(19) United States
(12) Patent Application Publication
(10) Pub. No.: US 2024/0301410 A1
(43) Pub. Date: Sep. 12, 2024

(54) OLIGONUCLEOTIDES FOR HTT-1A MODULATION

(71) Applicant: UNIVERSITY OF MASSACHUSETTS, Boston, MA (US)

(72) Inventors: Anastasia Khvorova, Westborough, MA (US); Julia Alterman, Worcester, MA (US); Socheata Ly, Boston, MA (US); Faith Conroy, Worcester, MA (US); Daniel O'Reilly, Boston, MA (US); Sarah Allen, Boston, MA (US)

(21) Appl. No.: 18/430,581

(22) Filed: Feb. 1, 2024

Related U.S. Application Data
(63) Continuation of application No. PCT/US2022/039047, filed on Aug. 1, 2022.
(60) Provisional application No. 63/228,366, filed on Aug. 2, 2021.

(51) Int. Cl. C12N 15/113

(52) U.S. Cl. CPC C12N 15/113; C12N 2310/14; C12N 2310/315; C12N 2310/321; C12N 2310/351

(57) ABSTRACT

This disclosure relates to novel HTT-1A targeting sequences. Novel HTT-1A targeting oligonucleotides for the treatment of neurodegenerative diseases are also provided.

### CROSS-REFERENCE TO RELATED APPLICATIONS

[0001] This application is a continuation of International Patent Application No. PCT/US2022/039047, filed Aug. 1, 2022, which claims the benefit of U.S. Provisional Patent Application Ser. No. 63/228,366, filed Aug. 2, 2021, the entire disclosures of which are hereby incorporated herein by reference.

### SEQUENCE LISTING

[0002] The instant application contains a Sequence Listing which has been submitted electronically in XML format and is hereby incorporated by reference in its entirety. Said XML file, created on Feb. 1, 2024, is named 731041_UM9-259CIPPCCON_ST26.xml and is 5,601,727 bytes in size.

### FIELD OF THE INVENTION

[0003] This disclosure relates to novel HTT-1A targeting sequences, novel branched oligonucleotides, and novel methods for treating and preventing HTT-1A-related neurodegeneration.

### BACKGROUND

[0004] Huntington's disease (HD) is a neurodegenerative disease caused by an expansion of the number of CAG repeats in the gene encoding for the protein huntingtin (HTT). Expansion of the number of CAG repeats to above 40 copies causes adult onset of Huntington's disease whereas CAG repeats of above 60-70 copies leads to a juvenile and a more progressive form of the disease.

[0005] HD manifests with a variety of symptoms that include motor, cognitive and psychiatric symptoms. The underlying molecular basis of the pathological symptoms have been investigated in HD knock-in mouse models. Above a certain number of CAG copies, the messenger RNA of HTT is incompletely spliced, producing a short mRNA comprising of HTT exon 1 and the 5′ part of intron 1 (Sathasivam et al., 2013). This short HTT variant is referred to as HTT-1A. Expression of this variant in mice leads to rapidly progressing clinical manifestations of HD. Therefore, the HTT-1A protein is considered a highly pathogenic HTT fragment. In humans, the truncated transcript has been detected in HD patient's fibroblasts and brain tissue, but not in control subject samples. Furthermore, HTT-1A mRNA levels are higher in HD patient's motor cortex and hippocampus as compared to controls.

[0006] Accordingly, there is a need to counteract or neutralize the HTT-1A variant from exerting negative neurodegenerative effects for the treatment of HD.

### SUMMARY

[0007] In one aspect, the disclosure provides a double stranded RNA (dsRNA) molecule comprising a sense strand and an antisense strand, wherein the antisense strand comprises a sequence substantially complementary to a HTT nucleic acid sequence of any one of the sequences recited in Table 18.

[0008] In one aspect, the disclosure provides a double stranded RNA (dsRNA) molecule comprising a sense strand and an antisense strand, wherein the antisense strand comprises a sequence substantially complementary to a HTT nucleic acid sequence of any one of SEQ ID NO: 1-13 (i.e., SEQ ID NO: 1, SEQ ID NO: 2, SEQ ID NO: 3, SEQ ID NO: 4, SEQ ID NO: 5, SEQ ID NO: 6, SEQ ID NO: 7, SEQ ID NO: 8, SEQ ID NO: 9, SEQ ID NO: 10, SEQ ID NO: 11, SEQ ID NO: 12, or SEQ ID NO: 13).

[0009] In one aspect, the disclosure provides a double stranded RNA (dsRNA) molecule comprising a sense strand and an antisense strand, wherein the antisense strand comprises a sequence substantially complementary to a HTT nucleic acid sequence selected from the group consisting of a nucleic acid sequence designated HTT-1A 424, HTT-1A 434, HTT-1A 452, HTT-1A 515, HTT-1A 596, HTT-1A 601, HTT-1A 620, HTT-1A 659, HTT-1A 1664, HTT-1A 1665, or HTT-1A 1666, as recited in Table 18.

[0010] In one aspect, the disclosure provides a double stranded RNA (dsRNA) molecule comprising a sense strand and an antisense strand, wherein the antisense strand comprises a sequence substantially complementary to a HTT nucleic acid sequence of CCGACTGAGTTTGGGCCCGCTGCAGCTCCCTGTCCCGGCGGGTCC (HTT-1A 424) (SEQ ID NO: 27).

[0011] In one aspect, the disclosure provides a double stranded RNA (dsRNA) molecule comprising a sense strand and an antisense strand, wherein the antisense strand comprises a sequence substantially complementary to a HTT nucleic acid sequence of TTGGGCCCGCTGCAGCTCCCTGTCCCGGCGGGTCCCAGGCTACGG (HTT-1A 434) (SEQ ID NO: 28).

[0012] In one aspect, the disclosure provides a double stranded RNA (dsRNA) molecule comprising a sense strand and an antisense strand, wherein the antisense strand comprises a sequence substantially complementary to a HTT nucleic acid sequence of CCTGTCCCGGCGGGTCCCAGGCTACGGCGGGGATGGCGGTAACCC (HTT-1A 452) (SEQ ID NO: 29).

[0013] In one aspect, the disclosure provides a double stranded RNA (dsRNA) molecule comprising a sense strand and an antisense strand, wherein the antisense strand comprises a sequence substantially complementary to a HTT nucleic acid sequence of GACACGAACCCCCGGCCCCGCAGAGACAGAGTGACCCAGCAACCC (HTT-1A 515) (SEQ ID NO: 30).

[0014] In one aspect, the disclosure provides a double stranded RNA (dsRNA) molecule comprising a sense strand and an antisense strand, wherein the antisense strand comprises a sequence substantially complementary to a HTT nucleic acid sequence of AGGCCTTCCCCCACTTCAGCCCCGCTCCCTCACTTGGGTCTTCCC (HTT-1A 596) (SEQ ID NO: 31).

[0015] In one aspect, the disclosure provides a double stranded RNA (dsRNA) molecule comprising a sense strand and an antisense strand, wherein the antisense strand comprises a sequence substantially complementary to a HTT nucleic acid sequence of TTCCCCCACTTCAGCCCCGCTCCCTCACTTGGGTCTTCCCTTGTC (HTT-1A 601) (SEQ ID NO: 32).

[0016] In one aspect, the disclosure provides a double stranded RNA (dsRNA) molecule comprising a sense strand and an antisense strand, wherein the antisense strand comprises a sequence substantially complementary to a HTT nucleic acid sequence of CTCCCTCACTTGGGTCTTCCCTTGTCCTCTCGCGAGGGGAGGCAG (HTT-1A 620) (SEQ ID NO: 33).

[0017] In one aspect, the disclosure provides a double stranded RNA (dsRNA) molecule comprising a sense strand and an antisense strand, wherein the antisense strand comprises a sequence substantially complementary to a HTT nucleic acid sequence of AGGCAGAGCCTTGTTGGGGCCTGTCCTGAATTCACCGAGGGGAGT (HTT-1A 659) (SEQ ID NO: 34).

[0018] In one aspect, the disclosure provides a double stranded RNA (dsRNA) molecule comprising a sense strand and an antisense strand, wherein the antisense strand comprises a sequence substantially complementary to a HTT nucleic acid sequence of CTGGATGTGTCCCAGATGGCATTTGGTAAGAATATCTCTGTTAAG (HTT-1A 1664) (SEQ ID NO: 4).

[0019] In one aspect, the disclosure provides a double stranded RNA (dsRNA) molecule comprising a sense strand and an antisense strand, wherein the antisense strand comprises a sequence substantially complementary to a HTT nucleic acid sequence of TGGATGTGTCCCAGATGGCATTTGGTAAGAATATCTCTGTTAAGA (HTT-1A 1665) (SEQ ID NO: 3).

[0020] In one aspect, the disclosure provides a double stranded RNA (dsRNA) molecule comprising a sense strand and an antisense strand, wherein the antisense strand comprises a sequence substantially complementary to a HTT nucleic acid sequence of GGATGTGTCCCAGATGGCATTTGGTAAGAATATCTCTGTTAAGAC (HTT-1A 1666) (SEQ ID NO: 2).

[0021] In one aspect, the disclosure provides a double stranded RNA (dsRNA) molecule comprising a sense strand and an antisense strand, wherein the antisense strand comprises a sequence substantially complementary to a HTT nucleic acid sequence selected from the group consisting of a nucleic acid sequence designated HTT-1A 424, HTT-1A 434, HTT-1A 452, HTT-1A 515, HTT-1A 596, HTT-1A 601, HTT-1A 620, HTT-1A 659, HTT-1A 1664, HTT-1A 1665, or HTT-1A 1666, as recited in Table 19.

[0022] In another aspect, the disclosure provides an RNA molecule having a length of from about 8 nucleotides to about 80 nucleotides; and a nucleic acid sequence that is substantially complementary to a HTT-1A nucleic acid sequence of any one of the sequences recited in Table 18.

[0023] In another aspect, the disclosure provides an RNA molecule having a length of from about 8 nucleotides to about 80 nucleotides; and a nucleic acid sequence that is substantially complementary to a HTT-1A nucleic acid sequence of any one of SEQ ID NO: 1-13 (i.e., SEQ ID NO: 1, SEQ ID NO: 2, SEQ ID NO: 3, SEQ ID NO: 4, SEQ ID NO: 5, SEQ ID NO: 6, SEQ ID NO: 7, SEQ ID NO: 8, SEQ ID NO: 9, SEQ ID NO: 10, SEQ ID NO: 11, SEQ ID NO: 12, or SEQ ID NO: 13).

[0024] In certain embodiments, the RNA molecule is from 8 nucleotides to 80 nucleotides in length (e.g., 8 nucleotides, 9 nucleotides, 10 nucleotides, 11 nucleotides, 12 nucleotides, 13 nucleotides, 14 nucleotides, 15 nucleotides, 16 nucleotides, 17 nucleotides, 18 nucleotides, 19 nucleotides, 20 nucleotides, 21 nucleotides, 22 nucleotides, 23 nucleotides, 24 nucleotides, 25 nucleotides, 26 nucleotides, 27 nucleotides, 28 nucleotides, 29 nucleotides, 30 nucleotides, 31 nucleotides, 32 nucleotides, 33 nucleotides, 34 nucleotides, 35 nucleotides, 36 nucleotides, 37 nucleotides, 38 nucleotides, 39 nucleotides, 40 nucleotides, 41 nucleotides, 42 nucleotides, 43 nucleotides, 44 nucleotides, 45 nucleotides, 46 nucleotides, 47 nucleotides, 48 nucleotides, 49 nucleotides, 50 nucleotides, 51 nucleotides, 52 nucleotides, 53 nucleotides, 54 nucleotides, 55 nucleotides, 56 nucleotides, 57 nucleotides, 58 nucleotides, 59 nucleotides, 60 nucleotides, 61 nucleotides, 62 nucleotides, 63 nucleotides, 64 nucleotides, 65 nucleotides, 66 nucleotides, 67 nucleotides, 68 nucleotides, 69 nucleotides, 70 nucleotides, 71 nucleotides, 72 nucleotides, 73 nucleotides, 74 nucleotides, 75 nucleotides, 76 nucleotides, 77 nucleotides, 78 nucleotides, 79 nucleotides, or 80 nucleotides in length).

[0025] In certain embodiments, the RNA molecule is from 10 to 50 nucleotides in length (e.g., 10 nucleotides, 11 nucleotides, 12 nucleotides, 13 nucleotides, 14 nucleotides, 15 nucleotides, 16 nucleotides, 17 nucleotides, 18 nucleotides, 19 nucleotides, 20 nucleotides, 21 nucleotides, 22 nucleotides, 23 nucleotides, 24 nucleotides, 25 nucleotides, 26 nucleotides, 27 nucleotides, 28 nucleotides, 29 nucleotides, 30 nucleotides, 31 nucleotides, 32 nucleotides, 33 nucleotides, 34 nucleotides, 35 nucleotides, 36 nucleotides, 37 nucleotides, 38 nucleotides, 39 nucleotides, 40 nucleotides, 41 nucleotides, 42 nucleotides, 43 nucleotides, 44 nucleotides, 45 nucleotides, 46 nucleotides, 47 nucleotides, 48 nucleotides, 49 nucleotides, or 50 nucleotides in length).

[0026] In certain embodiments, the RNA molecule comprises about 15 nucleotides to about 25 nucleotides in length. In certain embodiments, the RNA molecule is from 15 to 25 nucleotides in length (e.g., 15 nucleotides, 16 nucleotides, 17 nucleotides, 18 nucleotides, 19 nucleotides, 20 nucleotides, 21 nucleotides, 22 nucleotides, 23 nucleotides, 24 nucleotides, or 25 nucleotides in length).

[0027] In certain embodiments, the RNA molecule has a nucleic acid sequence that is substantially complementary to a HTT-1A nucleic acid sequence of any one of the sequences recited in Table 19.

[0028] In certain embodiments, the RNA molecule has a nucleic acid sequence that is substantially complementary to a HTT-1A nucleic acid sequence of any one of SEQ ID NO: 14-26.

[0029] In certain embodiments, the RNA molecule has a nucleic acid sequence that is at least 85% identical to the nucleic acid sequence of any one of the sequences recited in Tables 20-21 (e.g., 85%, 86%, 87%, 88%, 89%, 90%, 91%, 92%, 93%, 94%, 95%, 96%, 97%, 98%, 99%, or 100% identical to the nucleic acid sequence of any one of the sequences recited in Tables 20-21). In certain embodiments, the RNA molecule has a nucleic acid sequence that is at least 90% identical to the nucleic acid sequence of any one of the sequences recited in Tables 20-21 (e.g., 90%, 91%, 92%, 93%, 94%, 95%, 96%, 97%, 98%, 99%, or 100% identical to the nucleic acid sequence of any one of the sequences recited in Tables 20-21). In certain embodiments, the RNA molecule has a nucleic acid sequence that is at least 95% identical to the nucleic acid sequence of any one of the sequences recited in Tables 20-21 (e.g., 95%, 96%, 97%, 98%, 99%, or 100% identical to the nucleic acid sequence of any one of the sequences recited in Tables 20-21). In certain embodiments, the RNA molecule has the nucleic acid sequence of any one of the sequences recited in Tables 20-21.

[0030] In certain embodiments, the RNA molecule comprises single stranded (ss) RNA or double stranded (ds) RNA.

[0031] In certain embodiments, the RNA molecule is a dsRNA comprising a sense strand and an antisense strand. The antisense strand may comprise a nucleic acid sequence that is substantially complementary to a HTT-1A nucleic acid sequence of any one of the sequences recited in Table 18.

[0032] SEQ ID NO: 1-13 (i.e., SEQ ID NO: 1, SEQ ID NO: 2, SEQ ID NO: 3, SEQ ID NO: 4, SEQ ID NO: 5, SEQ ID NO: 6, SEQ ID NO: 7, SEQ ID NO: 8, SEQ ID NO: 9, SEQ ID NO: 10, SEQ ID NO: 11, SEQ ID NO: 12, or SEQ ID NO: 13).

[0033] In certain embodiments, the dsRNA comprises an antisense strand having complementarity to at least 10, 11, 12 or 13 contiguous nucleotides of a HTT-1A nucleic acid sequence of any one of the sequences recited in Table 18.

[0034] In certain embodiments, the dsRNA comprises an antisense strand having complementarity to at least 10, 11, 12 or 13 contiguous nucleotides of a HTT-1A nucleic acid sequence of any one of SEQ ID NO: 1-13 (i.e., SEQ ID NO: 1, SEQ ID NO: 2, SEQ ID NO: 3, SEQ ID NO: 4, SEQ ID NO: 5, SEQ ID NO: 6, SEQ ID NO: 7, SEQ ID NO: 8, SEQ ID NO: 9, SEQ ID NO: 10, SEQ ID NO: 11, SEQ ID NO: 12, or SEQ ID NO: 13).

[0035] In certain embodiments, the dsRNA comprises an antisense strand having complementarity to a segment of from 15 to 25 contiguous nucleotides of the nucleic acid sequence of any one of the sequences recited in Table 18.

[0036] In certain embodiments, the dsRNA comprises an antisense strand having complementarity to at least 10, 11, 12 or 13 contiguous nucleotides of a HTT-1A nucleic acid sequence of any one of SEQ ID NO: 1-13 (i.e., SEQ ID NO: 1, SEQ ID NO: 2, SEQ ID NO: 3, SEQ ID NO: 4, SEQ ID NO: 5, SEQ ID NO: 6, SEQ ID NO: 7, SEQ ID NO: 8, SEQ ID NO: 9, SEQ ID NO: 10, SEQ ID NO: 11, SEQ ID NO: 12, or SEQ ID NO: 13).

[0037] In certain embodiments, the dsRNA comprises an antisense strand having no more than 3 mismatches with a HTT-1A nucleic acid sequence of any one of the sequences recited in Table 18.

[0038] In certain embodiments, the dsRNA comprises an antisense strand having complementarity to at least 10, 11, 12 or 13 contiguous nucleotides of a HTT-1A nucleic acid sequence of any one of SEQ ID NO: 1-13 (i.e., SEQ ID NO: 1, SEQ ID NO: 2, SEQ ID NO: 3, SEQ ID NO: 4, SEQ ID NO: 5, SEQ ID NO: 6, SEQ ID NO: 7, SEQ ID NO: 8, SEQ ID NO: 9, SEQ ID NO: 10, SEQ ID NO: 11, SEQ ID NO: 12, or SEQ ID NO: 13).

[0039] In certain embodiments, the dsRNA comprises an antisense strand that is fully complementary to a HTT-1A nucleic acid sequence of any one of the sequences recited in Table 18.

[0040] In certain embodiments, the dsRNA comprises an antisense strand having complementarity to at least 10, 11, 12 or 13 contiguous nucleotides of a HTT-1A nucleic acid sequence of any one of SEQ ID NO: 1-13 (i.e., SEQ ID NO: 1, SEQ ID NO: 2, SEQ ID NO: 3, SEQ ID NO: 4, SEQ ID NO: 5, SEQ ID NO: 6, SEQ ID NO: 7, SEQ ID NO: 8, SEQ ID NO: 9, SEQ ID NO: 10, SEQ ID NO: 11, SEQ ID NO: 12, or SEQ ID NO: 13).

[0041] In certain embodiments, the dsRNA comprises an antisense strand that is at least 85% identical to the nucleic acid sequence of any one of the antisense strands in Table 20 (e.g., 85%, 86%, 87%, 88%, 89%, 90%, 91%, 92%, 93%, 94%, 95%, 96%, 97%, 98%, 99%, or 100% identical to the nucleic acid sequence of any one of the antisense strands in Table 20). In certain embodiments, the dsRNA comprises an antisense strand that is at least 90% identical to the nucleic acid sequence of any one the antisense strands in Table 20 (e.g., 90%, 91%, 92%, 93%, 94%, 95%, 96%, 97%, 98%, 99%, or 100% identical to the nucleic acid sequence of any one of the antisense strands in Table 20). In certain embodiments, the dsRNA comprises an antisense strand that is at least 95% identical to the nucleic acid sequence of any one of the antisense strands in Table 20 (e.g., 95%, 96%, 97%, 98%, 99%, or 100% identical to the nucleic acid sequence of any one of the antisense strands in Table 20). In certain embodiments, the dsRNA comprises an antisense strand that has the nucleic acid sequence of any one of the antisense strands in Table 20.

[0042] In certain embodiments, the antisense strand and/or sense strand comprises about 15 nucleotides to 25 nucleotides in length. For example, in certain embodiments, the antisense strand and/or sense strand is 15, 16, 17, 18, 19, 20, 21, 22, 23, 24, or 25 nucleotides in length.

[0043] In certain embodiments, the antisense strand is 20 nucleotides in length. In certain embodiments, the antisense strand is 21 nucleotides in length. In certain embodiments, the antisense strand is 22 nucleotides in length. In certain embodiments, the sense strand is 15 nucleotides in length. In certain embodiments, the sense strand is 16 nucleotides in length. In certain embodiments, the sense strand is 18 nucleotides in length. In certain embodiments, the sense strand is 20 nucleotides in length.

[0044] In certain embodiments, the antisense strand is 20 nucleotides in length and the sense strand is 15 nucleotides in length or 16 nucleotides in length.

[0045] In certain embodiments, the antisense strand is 21 nucleotides in length and the sense strand is 15 nucleotides in length or 16 nucleotides in length.

[0046] In certain embodiments, the antisense strand is 20 nucleotides in length or 21 nucleotides in length and the sense strand is 15 nucleotides in length.

[0047] In certain embodiments, the antisense strand is 20 nucleotides in length or 21 nucleotides in length and the sense strand is 16 nucleotides in length.

[0048] In certain embodiments, the antisense strand is 20 nucleotides in length and the sense strand is 15 nucleotides in length.

[0049] In certain embodiments, the antisense strand is 21 nucleotides in length and the sense strand is 16 nucleotides in length.

[0050] In certain embodiments, the dsRNA comprises a double-stranded region of 15 base pairs to 20 base pairs (e.g., 15 base pairs, 16 base pairs, 17 base pairs, 18 base pairs, 19 base pairs, or 20 base pairs). In certain embodiments, the dsRNA comprises a double-stranded region of 15 base pairs. In certain embodiments, the dsRNA comprises a double-stranded region of 16 base pairs. In certain embodiments, the dsRNA comprises a double-stranded region of 18 base pairs. In certain embodiments, the dsRNA comprises a double-stranded region of 20 base pairs.

[0051] In certain embodiments, the dsRNA comprises a blunt-end. In certain embodiments, the dsRNA comprises at least one single stranded nucleotide overhang. In certain embodiments, the dsRNA comprises about a 2-nucleotide to 5-nucleotide single stranded nucleotide overhang.

[0052] In certain embodiments, the dsRNA comprises naturally occurring nucleotides.

[0053] In certain embodiments, the dsRNA comprises at least one modified nucleotide.

[0054] In certain embodiments, the modified nucleotide comprises a 2′-O-methyl modified nucleotide, a 2′-deoxy-2′-fluoro modified nucleotide, a 2′-deoxy-modified nucleotide, a locked nucleotide, an abasic nucleotide, a 2′-amino-modified nucleotide, a 2′-alkyl-modified nucleotide, a morpholino nucleotide, a phosphoramidate, a non-natural base comprising nucleotide, or a mixture thereof.

[0055] In certain embodiments, the dsRNA comprises at least one modified internucleotide linkage.

[0056] In certain embodiments, the modified internucleotide linkage comprises a phosphorothioate internucleotide linkage. In certain embodiments, the dsRNA comprises 4-16 phosphorothioate internucleotide linkages (e.g., 4, 5, 6, 7, 8, 9, 10, 11, 12, 13, 14, 15, or 16 phosphorothioate linkages). In certain embodiments, the dsRNA comprises 8-13 phosphorothioate internucleotide linkages (e.g., 9, 10, 11, 12, or 13 phosphorothioate linkages).

[0057] In certain embodiments, the dsRNA comprises at least one modified internucleotide linkage of Formula I:

[chemical structure]

wherein:
[0058] B is a base pairing moiety;
[0059] W is selected from the group consisting of O, OCH₂, OCH, CH₂, and CH;
[0060] X is selected from the group consisting of halo, hydroxy, and C₁₋₆ alkoxy;
[0061] Y is selected from the group consisting of O⁻, OH, OR, NH⁻, NH₂, S⁻, and SH;
[0062] Z is selected from the group consisting of O and CH₂;
[0063] R is a protecting group; and
[0064] [symbol] is an optional double bond.

[0065] In certain embodiments, when W is CH, [symbol] is a double bond.

[0066] In certain embodiments, when W is selected from the group consisting of O, OCH₂, OCH, CH₂, [symbol] is a single bond.

[0067] In certain embodiments, the dsRNA comprises at least 80% chemically modified nucleotides (e.g., 80%, 81%, 82%, 83%, 84%, 85%, 86%, 87%, 88%, 89%, 90%, 91%, 92%, 93%, 94%, 95%, 96%, 97%, 98%, 99%, or 100% chemically modified nucleotides). In certain embodiments, the dsRNA is fully chemically modified. In certain embodiments, the dsRNA comprises at least 70% 2′-O-methyl nucleotide modifications (e.g., 70%, 71%, 72%, 73%, 74%, 75%, 76%, 77%, 78%, 79%, 80%, 81%, 82%, 83%, 84%, 85%, 86%, 87%, 88%, 89%, 90%, 91%, 92%, 93%, 94%, 95%, 96%, 97%, 98%, 99%, or 100% 2′-O-methyl modifications).

[0068] In certain embodiments, the dsRNA comprises from about 80% to about 90% 2′-O-methyl nucleotide modifications (e.g., about 80%, 81%, 82%, 83%, 84%, 85%, 86%, 87%, 88%, 89%, or 90% 2′-O-methyl nucleotide modifications). In certain embodiments, the dsRNA comprises from about 83% to about 86% 2′-O-methyl modifications (e.g., about 83%, 84%, 85%, or 86% 2′-O-methyl modifications).

[0069] In certain embodiments, the dsRNA comprises from about 70% to about 80% 2′-O-methyl nucleotide modifications (e.g., about 70%, 71%, 72%, 73%, 74%, 75%, 76%, 77%, 78%, 79%, or 80% 2′-O-methyl nucleotide modifications). In certain embodiments, the dsRNA comprises from about 75% to about 78% 2′-O-methyl modifications (e.g., about 75%, 76%, 77%, or 78% 2′-O-methyl modifications).

[0070] In certain embodiments, the antisense strand comprises at least 80% chemically modified nucleotides (e.g., 80%, 81%, 82%, 83%, 84%, 85%, 86%, 87%, 88%, 89%, 90%, 91%, 92%, 93%, 94%, 95%, 96%, 97%, 98%, 99%, or 100% chemically modified nucleotides). In certain embodiments, the antisense strand is fully chemically modified. In certain embodiments, the antisense strand comprises at least 70% 2′-O-methyl nucleotide modifications (e.g., 70%, 71%, 72%, 73%, 74%, 75%, 76%, 77%, 78%, 79%, 80%, 81%, 82%, 83%, 84%, 85%, 86%, 87%, 88%, 89%, 90%, 91%, 92%, 93%, 94%, 95%, 96%, 97%, 98%, 99%, or 100% 2′-O-methyl modifications). In certain embodiments, the antisense strand comprises about 70% to 90% 2′-O-methyl nucleotide modifications (e.g., about 70%, 71%, 72%, 73%, 74%, 75%, 76%, 77%, 78%, 79%, 80%, 81%, 82%, 83%, 84%, 85%, 86%, 87%, 88%, 89%, or 90% 2′-O-methyl modifications). In certain embodiments, the antisense strand comprises from about 85% to about 90% 2′-O-methyl modifications (e.g., about 85%, 86%, 87%, 88%, 89%, or 90% 2′-O-methyl modifications).

[0071] In certain embodiments, the antisense strand comprises about 75% to 85% 2′-O-methyl nucleotide modifications (e.g., about 75%, 76%, 77%, 78%, 79%, 80%, 81%, 82%, 83%, 84%, or 85% 2′-O-methyl modifications). In certain embodiments, the antisense strand comprises from about 76% to about 80% 2′-O-methyl modifications (e.g., about 76%, 77%, 78%, 79%, or 80% 2′-O-methyl modifications).

[0072] In certain embodiments, the sense strand comprises at least 80% chemically modified nucleotides (e.g., 80%, 81%, 82%, 83%, 84%, 85%, 86%, 87%, 88%, 89%, 90%, 91%, 92%, 93%, 94%, 95%, 96%, 97%, 98%, 99%, or 100% chemically modified nucleotides). In certain embodiments, the sense strand is fully chemically modified. In certain embodiments, the sense strand comprises at least 65% 2′-O-methyl nucleotide modifications (e.g., 65%, 66%, 67%, 68%, 69%, 70%, 71%, 72%, 73%, 74%, 75%, 76%, 77%, 78%, 79%, 80%, 81%, 82%, 83%, 84%, 85%, 86%, 87%, 88%, 89%, 90%, 91%, 92%, 93%, 94%, 95%, 96%, 97%, 98%, 99%, or 100% 2′-O-methyl modifications). In certain embodiments, the sense strand comprises 100% 2′-O-methyl nucleotide modifications.

[0073] In certain embodiments, the sense strand comprises from about 70% to about 85% 2′-O-methyl nucleotide modifications (e.g., about 70%, 71%, 72%, 73%, 74%, 75%, 76%, 77%, 78%, 79%, 80%, 81%, 82%, 83%, 84%, or 85% 2′-O-methyl nucleotide modifications). In certain embodiments, the sense strand comprises from about 75% to about 80% 2′-O-methyl nucleotide modifications (e.g., about 75%, 76%, 77%, 78%, 79%, or 80% 2′-O-methyl nucleotide modifications).

[0074] In certain embodiments, the sense strand comprises from about 65% to about 75% 2′-O-methyl nucleotide modifications (e.g., about 65%, 66%, 67%, 68%, 69%, 70%, 71%, 72%, 73%, 74%, or 75% 2′-O-methyl nucleotide modifications). In certain embodiments, the sense strand comprises from about 67% to about 73% 2′-O-methyl nucleotide modifications (e.g., about 67%, 68%, 69%, 70%, 71%, 72%, or 73% 2′-O-methyl nucleotide modifications).

[0075] In certain embodiments, the sense strand comprises one or more nucleotide mismatches between the antisense strand and the sense strand. In certain embodiments, the one or more nucleotide mismatches are present at positions 2, 6, and 12 from the 5′ end of sense strand. In certain embodiments, the nucleotide mismatches are present at positions 2, 6, and 12 from the 5′ end of the sense strand.

[0076] In certain embodiments, the antisense strand comprises a 5′ phosphate, a 5′-alkyl phosphonate, a 5′ alkylene phosphonate, or a 5′ alkenyl phosphonate.

[0077] In certain embodiments, the antisense strand comprises a 5′ vinyl phosphonate.

[0078] In certain embodiments, the dsRNA comprises an antisense strand and a sense strand, each strand with a 5′ end and a 3′ end, wherein: (1) the antisense strand has a nucleic acid sequence that is substantially complementary to a HTT-1A nucleic acid sequence of any one of the sequences recited in Table 18; (2) the antisense strand comprises alternating 2′-methoxy-ribonucleotides and 2′-fluoro-ribonucleotides; (3) the nucleotides at positions 2 and 14 from the 5′ end of the antisense strand are not 2′-methoxy-ribonucleotides; (4) the nucleotides at positions 1-2 to 1-7 from the 3′ end of the antisense strand are connected to each other via phosphorothioate internucleotide linkages; (5) a portion of the antisense strand is complementary to a portion of the sense strand; (6) the sense strand comprises alternating 2′-methoxy-ribonucleotides and 2′-fluoro-ribonucleotides; and (7) the nucleotides at positions 1-2 from the 5′ end of the sense strand are connected to each other via phosphorothioate internucleotide linkages.

[0079] In certain embodiments, the dsRNA comprises an antisense strand and a sense strand, each strand with a 5′ end and a 3′ end, wherein: (1) the antisense strand has a nucleic acid sequence that is substantially complementary to a HTT-1A nucleic acid sequence of any one of the sequences recited in Table 18; (2) the antisense strand comprises at least 70% 2′-O-methyl modifications (e.g., from about 75% to about 80% or from about 85% to about 90% 2′-O-methyl modifications); (3) the nucleotide at position 14 from the 5′ end of the antisense strand are not 2′-methoxy-ribonucleotides; (4) the nucleotides at positions 1-2 to 1-7 from the 3′ end of the antisense strand are connected to each other via phosphorothioate internucleotide linkages; (5) a portion of the antisense strand is complementary to a portion of the sense strand; (6) the sense strand comprises at least 65% 2′-O-methyl modifications (e.g., from about 65% to about 75% or from about 75% to about 80% 2′-O-methyl modifications); and (7) the nucleotides at positions 1-2 from the 5′ end of the sense strand are connected to each other via phosphorothioate internucleotide linkages.

[0080] In certain embodiments, the dsRNA comprises an antisense strand and a sense strand, each strand with a 5′ end and a 3′ end, wherein: (1) the antisense strand has a nucleic acid sequence that is substantially complementary to a HTT-1A nucleic acid sequence of any one of the sequences recited in Table 18; (2) the antisense strand comprises at least 85% 2′-O-methyl modifications; (3) the nucleotides at positions 2 and 14 from the 5′ end of the antisense strand are not 2′-methoxy-ribonucleotides; (4) the nucleotides at positions 1-2 to 1-7 from the 3′ end of the antisense strand are connected to each other via phosphorothioate internucleotide linkages; (5) a portion of the antisense strand is complementary to a portion of the sense strand; (6) the sense strand comprises 100% 2′-O-methyl modifications; and (7) the nucleotides at positions 1-2 from the 5′ end of the sense strand are connected to each other via phosphorothioate internucleotide linkages.

[0081] In certain embodiments, the dsRNA comprises an antisense strand and a sense strand, each strand with a 5′ end and a 3′ end, wherein: (1) the antisense strand has a nucleic acid sequence that is substantially complementary to a HTT-1A nucleic acid sequence of any one of the sequences recited in Table 18; (2) the antisense strand comprises at least 75% 2′-O-methyl modifications; (3) the nucleotides at positions 4, 5, 6, and 14 from the 5′ end of the antisense strand are not 2′-methoxy-ribonucleotides; (4) the nucleotides at positions 1-2 to 1-7 from the 3′ end of the antisense strand are connected to each other via phosphorothioate internucleotide linkages; (5) a portion of the antisense strand is complementary to a portion of the sense strand; (6) the sense strand comprises 100% 2′-O-methyl modifications; and (7) the nucleotides at positions 1-2 from the 5′ end of the sense strand are connected to each other via phosphorothioate internucleotide linkages.

[0082] In certain embodiments, the dsRNA comprises an antisense strand and a sense strand, each strand with a 5′ end and a 3′ end, wherein: (1) the antisense strand has a nucleic acid sequence that is substantially complementary to a HTT-1A nucleic acid sequence of any one of the sequences recited in Table 18; (2) the antisense strand comprises at least 85% 2′-O-methyl modifications (e.g., from about 85% to about 90% 2′-O-methyl modifications); (3) the nucleotides at positions 2 and 14 from the 5′ end of the antisense strand are not 2′-methoxy-ribonucleotides (e.g., the nucleotides at positions 2 and 14 from the 5′ end of the antisense strand may be 2′-fluoro nucleotides); (4) the nucleotides at positions 1-2 to 1-7 from the 3′ end of the antisense strand are connected to each other via phosphorothioate internucleotide linkages; (5) a portion of the antisense strand is complementary to a portion of the sense strand; (6) the sense strand comprises at least 75% 2′-O-methyl modifications (e.g., from about 75% to about 80% 2′-O-methyl modifications); (7) the nucleotides at positions 7, 10, and 11 from the 3′ end of the sense strand are not 2′-methoxy-ribonucleotides (e.g., the nucleotides at positions 7, 10, and 11 from the 3′ end of the sense strand are 2′-fluoro nucleotides); and (8) the nucleotides at positions 1-2 from the 5′ end of the sense strand are connected to each other via phosphorothioate internucleotide linkages.

[0083] In certain embodiments, the dsRNA comprises an antisense strand and a sense strand, each strand with a 5′ end and a 3′ end, wherein: (1) the antisense strand has a nucleic acid sequence that is substantially complementary to a HTT-1A nucleic acid sequence of any one of the sequences recited in Table 18; (2) the antisense strand comprises at least 75% 2′-O-methyl modifications (e.g., from about 75% to about 80% 2′-O-methyl modifications); (3) the nucleotides at positions 2, 4, 5, 6, and 14 from the 5′ end of the antisense strand are not 2′-methoxy-ribonucleotides (e.g., the nucleotides at positions 2, 6, 14, and 16 from the 5′ end of the antisense strand may be 2′-fluoro nucleotides); (4) the nucleotides at positions 1-2 to 1-7 from the 3′ end of the antisense strand are connected to each other via phosphorothioate internucleotide linkages; (5) a portion of the antisense strand is complementary to a portion of the sense strand; (6) the sense strand comprises 100% 2′-O-methyl modifications; and (7) the nucleotides at positions 1-2 from the 5′ end of the sense strand are connected to each other via phosphorothioate internucleotide linkages.

[0084] In certain embodiments, the dsRNA comprises an antisense strand and a sense strand, each strand with a 5′ end and a 3′ end, wherein: (1) the antisense strand has a nucleic acid sequence that is substantially complementary to a HTT-1A nucleic acid sequence of any one of the sequences recited in Table 18; (2) the antisense strand comprises at least 75% 2′-O-methyl modifications (e.g., from about 75% to about 80% 2′-O-methyl modifications); (3) the nucleotides at positions 2, 6, 14, and 16 from the 5′ end of the antisense strand are not 2′-methoxy-ribonucleotides (e.g., the nucleotides at positions 2, 6, 14, and 16 from the 5′ end of the antisense strand may be 2′-fluoro nucleotides); (4) the nucleotides at positions 1-2 to 1-7 from the 3′ end of the antisense strand are connected to each other via phosphorothioate internucleotide linkages; (5) a portion of the antisense strand is complementary to a portion of the sense strand; (6) the sense strand comprises at least 65% 2′-O-methyl modifications (e.g., from about 65% to about 75% 2′-O-methyl modifications); (7) the nucleotides at positions 7, 9, 10, and 11 from the 3′ end of the sense strand are not 2′-methoxy-ribonucleotides (e.g., the nucleotides at positions 7, 9, 10, and 11 from the 3′ end of the sense strand are 2′-fluoro nucleotides); and (8) the nucleotides at positions 1-2 from the 5′ end of the sense strand are connected to each other via phosphorothioate internucleotide linkages.

[0085] In certain embodiments, the dsRNA comprises an antisense strand and a sense strand, each strand with a 5′ end and a 3′ end, wherein: (1) the antisense strand comprises a sequence substantially complementary to a HTT-1A nucleic acid sequence of any one of the sequences recited in Table 18; (2) the antisense strand comprises at least 75% 2′-O-methyl modifications; (3) the nucleotides at positions 2, 6, and 14 from the 5′ end of the antisense strand are not 2′-methoxy-ribonucleotides; (4) the nucleotides at positions 1-2 to 1-7 from the 3′ end of the antisense strand are connected to each other via phosphorothioate internucleotide linkages; (5) a portion of the antisense strand is complementary to a portion of the sense strand; (6) the sense strand comprises at least 80% 2′-O-methyl modifications; (7) the nucleotides at positions 7, 10, and 11 from the 3′ end of the sense strand are not 2′-methoxy-ribonucleotides; and (8) the nucleotides at positions 1-2 from the 5′ end of the sense strand are connected to each other via phosphorothioate internucleotide linkages.

[0086] In certain embodiments, a functional moiety is linked to the 5′ end and/or 3′ end of the antisense strand. In certain embodiments, a functional moiety is linked to the 5′ end and/or 3′ end of the sense strand. In certain embodiments, a functional moiety is linked to the 3′ end of the sense strand.

[0087] In certain embodiments, the functional moiety comprises a hydrophobic moiety.

[0088] In certain embodiments, the hydrophobic moiety is selected from the group consisting of fatty acids, steroids, secosteroids, lipids, gangliosides, nucleoside analogs, endocannabinoids, vitamins, and a mixture thereof.

[0089] In certain embodiments, the steroid selected from the group consisting of cholesterol and Lithocholic acid (LCA).

[0090] In certain embodiments, the fatty acid selected from the group consisting of Eicosapentaenoic acid (EPA), Docosahexaenoic acid (DHA) and Docosanoic acid (DCA).

[0091] In certain embodiments, the vitamin is selected from the group consisting of choline, vitamin A, vitamin E, and derivatives or metabolites thereof.

[0092] In certain embodiments, the vitamin is selected from the group consisting of retinoic acid and alpha-tocopheryl succinate.

[0093] In certain embodiments, the functional moiety is linked to the antisense strand and/or sense strand by a linker.

[0094] In certain embodiments, the linker comprises a divalent or trivalent linker.

[0095] In certain embodiments, the divalent or trivalent linker is selected from the group consisting of:

[chemical structure]

wherein n is 1, 2, 3, 4, or 5.

[0096] In certain embodiments, the linker comprises an ethylene glycol chain, an alkyl chain, a peptide, an RNA, a DNA, a phosphodiester, a phosphorothioate, a phosphoramidate, an amide, a carbamate, or a combination thereof.

[0097] In certain embodiments, when the linker is a trivalent linker, the linker further links a phosphodiester or phosphodiester derivative.

[0098] In certain embodiments, the phosphodiester or phosphodiester derivative is selected from the group consisting of:

[chemical structure]

[0099] wherein X is O, S or BH₃.

[0100] In certain embodiments, the nucleotides at positions 1 and 2 from the 3′ end of sense strand, and the nucleotides at positions 1 and 2 from the 5′ end of antisense strand, are connected to adjacent ribonucleotides via phosphorothioate linkages.

[0101] In one aspect, the disclosure provides a pharmaceutical composition for inhibiting the expression of huntingtin variant 1A (HTT-1A) gene in an organism, comprising the dsRNA recited above and a pharmaceutically acceptable carrier.

[0102] In certain embodiments, the dsRNA inhibits the expression of said HTT-1A gene by at least 50%. In certain embodiments, the dsRNA inhibits the expression of said HTT-1A gene by at least 80%.

[0103] In one aspect, the disclosure provides a method for inhibiting expression of HTT-1A gene in a cell, the method comprising: (a) introducing into the cell a double-stranded ribonucleic acid (dsRNA) recited above; and (b) maintaining the cell produced in step (a) for a time sufficient to obtain degradation of the mRNA transcript of the HTT-1A gene, thereby inhibiting expression of the HTT-1A gene in the cell.

[0104] In one aspect, the disclosure provides a method of treating or managing a neurodegenerative disease comprising administering to a patient in need of such treatment or management a therapeutically effective amount of said dsRNA recited above.

[0105] In certain embodiments, the dsRNA is administered to the brain of the patient.

[0106] In certain embodiments, the dsRNA is administered by intracerebroventricular (ICV) injection, intrastriatal (IS) injection, intravenous (IV) injection, subcutaneous (SQ) injection or a combination thereof.

[0107] In certain embodiments, administering the dsRNA causes a decrease in HTT-1A gene mRNA in one or more of the hippocampus, striatum, cortex, cerebellum, thalamus, hypothalamus, and spinal cord.

[0108] In certain embodiments, the dsRNA inhibits the expression of said HTT-1A gene by at least 50%. In certain embodiments, the dsRNA inhibits the expression of said HTT-1A gene by at least 80%.

[0109] In one aspect, the disclosure provides a vector comprising a regulatory sequence operably linked to a nucleotide sequence that encodes an RNA molecule substantially complementary to a HTT-1A nucleic acid sequence of any one of the sequences recited in Table 18.

[0110] In certain embodiments, the RNA molecule inhibits the expression of said HTT-1A gene by at least 50%. In certain embodiments, the RNA molecule inhibits the expression of said HTT-1A gene by at least 80%.

[0111] In certain embodiments, the RNA molecule comprises ssRNA or dsRNA.

[0112] In certain embodiments, the dsRNA comprises a sense strand and an antisense strand, wherein the antisense strand comprises a sequence substantially complementary to a HTT-1A nucleic acid sequence of any one of the sequences recited in Table 18.

[0113] In one aspect, the disclosure provides a cell comprising the vector recited above.

[0114] In one aspect, the disclosure provides a recombinant adeno-associated virus (rAAV) comprising the vector above and an AAV capsid.

[0115] In one aspect, the disclosure provides a branched RNA compound comprising two or more RNA molecules, such as two or more RNA molecules that each comprise from 15 to 40 nucleotides in length (e.g., 15, 16, 17, 18, 19, 20, 21, 22, 23, 24, 25, 26, 27, 28, 29, 30, 31, 32, 33, 34, 35, 36, 37, 38, 39, or 40 nucleotides in length), wherein each RNA molecule comprises a portion having a nucleic acid sequence that is substantially complementary to a segment of a HTT-1A mRNA. The two RNA molecules may be connected to one another by one or more moieties independently selected from a linker, a spacer and a branching point.

[0116] In one aspect, the disclosure provides a branched RNA compound comprising two or more RNA molecules, such as two or more RNA molecules that each comprise from 15 to 40 nucleotides in length (e.g., 15, 16, 17, 18, 19, 20, 21, 22, 23, 24, 25, 26, 27, 28, 29, 30, 31, 32, 33, 34, 35, 36, 37, 38, 39, or 40 nucleotides in length), wherein each RNA molecule comprises a portion having a nucleic acid sequence that is substantially complementary to a nucleic acid of any one of SEQ ID NO: 1-13 (i.e., SEQ ID NO: 1, SEQ ID NO: 2, SEQ ID NO: 3, SEQ ID NO: 4, SEQ ID NO: 5, SEQ ID NO: 6, SEQ ID NO: 7, SEQ ID NO: 8, SEQ ID NO: 9, SEQ ID NO: 10, SEQ ID NO: 11, SEQ ID NO: 12, or SEQ ID NO: 13).

[0117] In certain embodiments, the branched RNA molecule comprises one or both of ssRNA and dsRNA.

[0118] In certain embodiments, the branched RNA molecule comprises an antisense oligonucleotide.

[0119] In certain embodiments, each RNA molecule comprises a dsRNA comprising a sense strand and an antisense strand, wherein each antisense strand independently comprises a sequence that is substantially complementary to a HTT-1A nucleic acid sequence of any one of the sequences recited in Table 18.

[0120] In certain embodiments, each RNA molecule comprises a dsRNA comprising a sense strand and an antisense strand, wherein each antisense strand independently comprises a sequence that is substantially complementary to a HTT-1A nucleic acid sequence of any one of SEQ ID NO: 1-13 (i.e., SEQ ID NO: 1, SEQ ID NO: 2, SEQ ID NO: 3, SEQ ID NO: 4, SEQ ID NO: 5, SEQ ID NO: 6, SEQ ID NO: 7, SEQ ID NO: 8, SEQ ID NO: 9, SEQ ID NO: 10, SEQ ID NO: 11, SEQ ID NO: 12, or SEQ ID NO: 13).

[0121] In certain embodiments, the branched RNA compound comprises two or more copies of the RNA molecule of any of the above aspects or embodiments of the disclosure covalently bound to one another (e.g., by way of a linker, spacer, or branching point).

[0122] In certain embodiments, the branched RNA compound comprises a portion of a nucleic acid sequence that is substantially complementary to a HTT-1A nucleic acid sequence of any one of the sequences recited in Table 18. For example, the branched RNA compound may comprise two or more dsRNA molecules that are covalently bound to one another (e.g., by way of a linker, spacer, or branching point) and that each comprise an antisense strand having complementarity to at least 10, 11, 12 or 13 contiguous nucleotides of a HTT-1A nucleic acid sequence of any one of the sequences recited in Table 18. For example, in certain embodiments, the dsRNA comprises an antisense strand having complementarity to a segment of from 10 to 25 contiguous nucleotides of the nucleic acid sequence of any one of the sequences recited in Table 18

[0123] In certain embodiments, each dsRNA in the branched RNA compound comprises an antisense strand having complementarity to a segment of from 15 to 25 contiguous nucleotides of the nucleic acid sequence of any one of the sequences recited in Table 18.

[0124] In certain embodiments, each dsRNA in the branched RNA compound comprises an antisense strand having no more than 3 mismatches with a HTT-1A nucleic acid sequence of any one of the sequences recited in Table 18.

[0125] In certain embodiments, each dsRNA in the branched RNA compound comprises an antisense strand that is fully complementary to a HTT-1A nucleic acid sequence of any one of the sequences recited in Table 18.

[0126] In certain embodiments, the branched RNA compound comprises a portion having a nucleic acid sequence that is substantially complementary to one or more of a HTT-1A nucleic acid sequence of any one of the sequences recited in Table 19.

[0127] In certain embodiments, the RNA molecule comprises an antisense oligonucleotide.

[0128] In certain embodiments, each RNA molecule comprises 15 to 25 nucleotides in length.

[0129] In certain embodiments, the antisense strand and/or sense strand comprises about 15 nucleotides to 25 nucleotides in length. For example, in certain embodiments, the antisense strand and/or sense strand is 15, 16, 17, 18, 19, 20, 21, 22, 23, 24, or 25 nucleotides in length. In certain embodiments, the antisense strand is 20 nucleotides in length. In certain embodiments, the antisense strand is 21 nucleotides in length. In certain embodiments, the antisense strand is 22 nucleotides in length. In certain embodiments, the sense strand is 15 nucleotides in length. In certain embodiments, the sense strand is 16 nucleotides in length. In certain embodiments, the sense strand is 18 nucleotides in length. In certain embodiments, the sense strand is 20 nucleotides in length.

[0130] In certain embodiments, the antisense strand is 20 nucleotides in length and the sense strand is 15 nucleotides in length or 16 nucleotides in length.

[0131] In certain embodiments, the antisense strand is 21 nucleotides in length and the sense strand is 15 nucleotides in length or 16 nucleotides in length.

[0132] In certain embodiments, the antisense strand is 20 nucleotides in length or 21 nucleotides in length and the sense strand is 15 nucleotides in length.

[0133] In certain embodiments, the antisense strand is 20 nucleotides in length or 21 nucleotides in length and the sense strand is 16 nucleotides in length.

[0134] In certain embodiments, the antisense strand is 20 nucleotides in length and the sense strand is 15 nucleotides in length.

[0135] In certain embodiments, the antisense strand is 21 nucleotides in length and the sense strand is 16 nucleotides in length.

[0136] In certain embodiments, the dsRNA comprises a double-stranded region of 15 base pairs to 20 base pairs. In certain embodiments, the dsRNA comprises a double-stranded region of 15 base pairs. In certain embodiments, the dsRNA comprises a double-stranded region of 16 base pairs. In certain embodiments, the dsRNA comprises a double-stranded region of 18 base pairs. In certain embodiments, the dsRNA comprises a double-stranded region of 20 base pairs.

[0137] In certain embodiments, the dsRNA comprises a blunt-end.

[0138] In certain embodiments, the dsRNA comprises at least one single stranded nucleotide overhang. In certain embodiments, the dsRNA comprises between a 2-nucleotide to 5-nucleotide single stranded nucleotide overhang.

[0139] In certain embodiments, the dsRNA comprises naturally occurring nucleotides.

[0140] In certain embodiments, the dsRNA comprises at least one modified nucleotide.

[0141] In certain embodiments, the modified nucleotide comprises a 2′-O-methyl modified nucleotide, a 2′-deoxy-2′-fluoro modified nucleotide, a 2′-deoxy-modified nucleotide, a locked nucleotide, an abasic nucleotide, a 2′-amino-modified nucleotide, a 2′-alkyl-modified nucleotide, a morpholino nucleotide, a phosphoramidate, or a non-natural base comprising nucleotide.

[0142] In certain embodiments, the dsRNA comprises at least one modified internucleotide linkage.

[0143] In certain embodiments, the modified internucleotide linkage comprises a phosphorothioate internucleotide linkage. In certain embodiments, the branched RNA compound comprises 4-16 phosphorothioate internucleotide linkages. In certain embodiments, the branched RNA compound comprises 8-13 phosphorothioate internucleotide linkages.

[0144] In certain embodiments, the dsRNA comprises at least one modified internucleotide linkage of Formula I:

[chemical structure]

wherein:
[0145] B is a base pairing moiety;
[0146] W is selected from the group consisting of O, OCH₂, OCH, CH₂, and CH;
[0147] X is selected from the group consisting of halo, hydroxy, and C₁₋₆ alkoxy;
[0148] Y is selected from the group consisting of O⁻, OH, OR, NH⁻, NH₂, S⁻, and SH;
[0149] Z is selected from the group consisting of O and CH₂;
[0150] R is a protecting group; and
[0151] [symbol] is an optional double bond.

[0152] In certain embodiments, when W is CH, [symbol] is a double bond.

[0153] In certain embodiments, when W is selected from the group consisting of O, OCH₂, OCH, CH₂, [symbol] is a single bond.

[0154] In certain embodiments, the dsRNA comprises at least 80% chemically modified nucleotides (e.g., 80%, 81%, 82%, 83%, 84%, 85%, 86%, 87%, 88%, 89%, 90%, 91%, 92%, 93%, 94%, 95%, 96%, 97%, 98%, 99%, or 100% chemically modified nucleotides). In certain embodiments, the dsRNA is fully chemically modified. In certain embodiments, the dsRNA comprises at least 70% 2′-O-methyl nucleotide modifications (e.g., 70%, 71%, 72%, 73%, 74%, 75%, 76%, 77%, 78%, 79%, 80%, 81%, 82%, 83%, 84%, 85%, 86%, 87%, 88%, 89%, 90%, 91%, 92%, 93%, 94%, 95%, 96%, 97%, 98%, 99%, or 100% 2′-O-methyl modifications).

[0155] In certain embodiments, the antisense strand comprises at least 80% chemically modified nucleotides.

[0156] In certain embodiments, the antisense strand is fully chemically modified.

[0157] In certain embodiments, the antisense strand comprises at least 70% 2′-O-methyl nucleotide modifications. In certain embodiments, the antisense strand comprises about 70% to 90% 2′-O-methyl nucleotide modifications. In certain embodiments, the antisense strand comprises from about 85% to about 90% 2′-O-methyl modifications (e.g., about 85%, 86%, 87%, 88%, 89%, or 90% 2′-O-methyl modifications).

[0158] In certain embodiments, the antisense strand comprises about 75% to 85% 2′-O-methyl nucleotide modifications (e.g., about 75%, 76%, 77%, 78%, 79%, 80%, 81%, 82%, 83%, 84%, or 85% 2′-O-methyl modifications). In certain embodiments, the antisense strand comprises from about 76% to about 80% 2′-O-methyl modifications (e.g., about 76%, 77%, 78%, 79%, or 80% 2′-O-methyl modifications).

[0159] In certain embodiments, the sense strand comprises at least 80% chemically modified nucleotides. In certain embodiments, the sense strand is fully chemically modified. In certain embodiments, the sense strand comprises at least 65% 2′-O-methyl nucleotide modifications. In certain embodiments, the sense strand comprises 100% 2′-O-methyl nucleotide modifications.

[0160] In certain embodiments, the sense strand comprises one or more nucleotide mismatches between the antisense strand and the sense strand. In certain embodiments, the one or more nucleotide mismatches are present at positions 2, 6, and 12 from the 5′ end of sense strand. In certain embodiments, the nucleotide mismatches are present at positions 2, 6, and 12 from the 5′ end of the sense strand.

[0161] In certain embodiments, the antisense strand comprises a 5′ phosphate, a 5′-alkyl phosphonate, a 5′ alkylene phosphonate, a 5′ alkenyl phosphonate, or a mixture thereof.

[0162] In certain embodiments, the antisense strand comprises a 5′ vinyl phosphonate.

[0163] In certain embodiments, the dsRNA comprises an antisense strand and a sense strand, each strand with a 5′ end and a 3′ end, wherein: (1) the antisense strand has a nucleic acid sequence that is substantially complementary to a HTT-1A nucleic acid sequence of any one of the sequences recited in Table 18; (2) the antisense strand comprises alternating 2′-methoxy-ribonucleotides and 2′-fluoro-ribonucleotides; (3) the nucleotides at positions 2 and 14 from the 5′ end of the antisense strand are not 2′-methoxy-ribonucleotides; (4) the nucleotides at positions 1-2 to 1-7 from the 3′ end of the antisense strand are connected to each other via phosphorothioate internucleotide linkages; (5) a portion of the antisense strand is complementary to a portion of the sense strand; (6) the sense strand comprises alternating 2′-methoxy-ribonucleotides and 2′-fluoro-ribonucleotides; and (7) the nucleotides at positions 1-2 from the 5′ end of the sense strand are connected to each other via phosphorothioate internucleotide linkages.

[0164] In certain embodiments, the dsRNA comprises an antisense strand and a sense strand, each strand with a 5′ end and a 3′ end, wherein: (1) the antisense strand has a nucleic acid sequence that is substantially complementary to a HTT-1A nucleic acid sequence of any one of the sequences recited in Table 18; (2) the antisense strand comprises at least 70% 2′-O-methyl modifications (e.g., from about 75% to about 80% or from about 85% to about 90% 2′-O-methyl modifications); (3) the nucleotide at position 14 from the 5′ end of the antisense strand are not 2′-methoxy-ribonucleotides; (4) the nucleotides at positions 1-2 to 1-7 from the 3′ end of the antisense strand are connected to each other via phosphorothioate internucleotide linkages; (5) a portion of the antisense strand is complementary to a portion of the sense strand; (6) the sense strand comprises at least 65% 2′-O-methyl modifications (e.g., from about 65% to about 75% or from about 75% to about 80% 2′-O-methyl modifications); and (7) the nucleotides at positions 1-2 from the 5′ end of the sense strand are connected to each other via phosphorothioate internucleotide linkages.

[0165] In certain embodiments, the dsRNA comprises an antisense strand and a sense strand, each strand with a 5′ end and a 3′ end, wherein: (1) the antisense strand has a nucleic acid sequence that is substantially complementary to a HTT-1A nucleic acid sequence of any one of the sequences recited in Table 18; (2) the antisense strand comprises at least 85% 2′-O-methyl modifications; (3) the nucleotides at positions 2 and 14 from the 5′ end of the antisense strand are not 2′-methoxy-ribonucleotides; (4) the nucleotides at positions 1-2 to 1-7 from the 3′ end of the antisense strand are connected to each other via phosphorothioate internucleotide linkages; (5) a portion of the antisense strand is complementary to a portion of the sense strand; (6) the sense strand comprises 100% 2′-O-methyl modifications; and (7) the nucleotides at positions 1-2 from the 5′ end of the sense strand are connected to each other via phosphorothioate internucleotide linkages.

[0166] In certain embodiments, the dsRNA comprises an antisense strand and a sense strand, each strand with a 5′ end and a 3′ end, wherein: (1) the antisense strand has a nucleic acid sequence that is substantially complementary to a HTT-1A nucleic acid sequence of any one of the sequences recited in Table 18; (2) the antisense strand comprises at least 75% 2′-O-methyl modifications; (3) the nucleotides at positions 4, 5, 6, and 14 from the 5′ end of the antisense strand are not 2′-methoxy-ribonucleotides; (4) the nucleotides at positions 1-2 to 1-7 from the 3′ end of the antisense strand are connected to each other via phosphorothioate internucleotide linkages; (5) a portion of the antisense strand is complementary to a portion of the sense strand; (6) the sense strand comprises 100% 2′-O-methyl modifications; and (7) the nucleotides at positions 1-2 from the 5′ end of the sense strand are connected to each other via phosphorothioate internucleotide linkages.

[0167] In certain embodiments, the dsRNA comprises an antisense strand and a sense strand, each strand with a 5′ end and a 3′ end, wherein: (1) the antisense strand has a nucleic acid sequence that is substantially complementary to a HTT-1A nucleic acid sequence of any one of the sequences recited in Table 18; (2) the antisense strand comprises at least 85% 2′-O-methyl modifications (e.g., from about 85% to about 90% 2′-O-methyl modifications); (3) the nucleotides at positions 2 and 14 from the 5′ end of the antisense strand are not 2′-methoxy-ribonucleotides (e.g., the nucleotides at positions 2 and 14 from the 5′ end of the antisense strand may be 2′-fluoro nucleotides); (4) the nucleotides at positions 1-2 to 1-7 from the 3′ end of the antisense strand are connected to each other via phosphorothioate internucleotide linkages; (5) a portion of the antisense strand is complementary to a portion of the sense strand; (6) the sense strand comprises at least 75% 2′-O-methyl modifications (e.g., from about 75% to about 80% 2′-O-methyl modifications); (7) the nucleotides at positions 7, 10, and 11 from the 3′ end of the sense strand are not 2′-methoxy-ribonucleotides (e.g., the nucleotides at positions 7, 10, and 11 from the 3′ end of the sense strand are 2′-fluoro nucleotides); and (8) the nucleotides at positions 1-2 from the 5′ end of the sense strand are connected to each other via phosphorothioate internucleotide linkages.

[0168] In certain embodiments, the dsRNA comprises an antisense strand and a sense strand, each strand with a 5′ end and a 3′ end, wherein: (1) the antisense strand has a nucleic acid sequence that is substantially complementary to a HTT-1A nucleic acid sequence of any one of the sequences recited in Table 18; (2) the antisense strand comprises at least 75% 2′-O-methyl modifications (e.g., from about 75% to about 80% 2′-O-methyl modifications); (3) the nucleotides at positions 2, 4, 5, 6, and 14 from the 5′ end of the antisense strand are not 2′-methoxy-ribonucleotides (e.g., the nucleotides at positions 2, 4, 5, 6, 14, and 16 from the 5′ end of the antisense strand may be 2′-fluoro nucleotides); (4) the nucleotides at positions 1-2 to 1-7 from the 3′ end of the antisense strand are connected to each other via phosphorothioate internucleotide linkages; (5) a portion of the antisense strand is complementary to a portion of the sense strand; (6) the sense strand comprises 100% 2′-O-methyl modifications; and (7) the nucleotides at positions 1-2 from the 5′ end of the sense strand are connected to each other via phosphorothioate internucleotide linkages.

[0169] In certain embodiments, the dsRNA comprises an antisense strand and a sense strand, each strand with a 5′ end and a 3′ end, wherein: (1) the antisense strand has a nucleic acid sequence that is substantially complementary to a HTT-1A nucleic acid sequence of any one of the sequences recited in Table 18; (2) the antisense strand comprises at least 75% 2′-O-methyl modifications (e.g., from about 75% to about 80% 2′-O-methyl modifications); (3) the nucleotides at positions 2, 6, 14, and 16 from the 5′ end of the antisense strand are not 2′-methoxy-ribonucleotides (e.g., the nucleotides at positions 2, 6, 14, and 16 from the 5′ end of the antisense strand may be 2′-fluoro nucleotides); (4) the nucleotides at positions 1-2 to 1-7 from the 3′ end of the antisense strand are connected to each other via phosphorothioate internucleotide linkages; (5) a portion of the antisense strand is complementary to a portion of the sense strand; (6) the sense strand comprises at least 65% 2′-O-methyl modifications (e.g., from about 65% to about 75% 2′-O-methyl modifications); (7) the nucleotides at positions 7, 9, 10, and 11 from the 3′ end of the sense strand are not 2′-methoxy-ribonucleotides; and (8) the nucleotides at positions 1-2 from the 5′ end of the sense strand are connected to each other via phosphorothioate internucleotide linkages.

[0170] In certain embodiments, the dsRNA comprises an antisense strand and a sense strand, each strand with a 5′ end and a 3′ end, wherein: (1) the antisense strand has a nucleic acid sequence that is substantially complementary to a HTT-1A nucleic acid sequence of any one of the sequences recited in Table 18; (2) the antisense strand comprises at least 75% 2′-O-methyl modifications; (3) the nucleotides at positions 2, 6, and 14 from the 5′ end of the antisense strand are not 2′-methoxy-ribonucleotides; (4) the nucleotides at positions 1-2 to 1-7 from the 3′ end of the antisense strand are connected to each other via phosphorothioate internucleotide linkages; (5) a portion of the antisense strand is complementary to a portion of the sense strand; (6) the sense strand comprises at least 80% 2′-O-methyl modifications; (7) the nucleotides at positions 7, 10, and 11 from the 3′ end of the sense strand are not 2′-methoxy-ribonucleotides; and (8) the nucleotides at positions 1-2 from the 5′ end of the sense strand are connected to each other via phosphorothioate internucleotide linkages.

[0171] In certain embodiments, a functional moiety is linked to the 5′ end and/or 3′ end of the antisense strand. In certain embodiments, a functional moiety is linked to the 5′ end and/or 3′ end of the sense strand. In certain embodiments, a functional moiety is linked to the 3′ end of the sense strand.

[0172] In certain embodiments, the functional moiety comprises a hydrophobic moiety.

[0173] In certain embodiments, the hydrophobic moiety is selected from the group consisting of fatty acids, steroids, secosteroids, lipids, gangliosides, nucleoside analogs, endocannabinoids, vitamins, and a mixture thereof.

[0174] In certain embodiments, the steroid is selected from the group consisting of cholesterol and Lithocholic acid (LCA).

[0175] In certain embodiments, the fatty acid is selected from the group consisting of Eicosapentaenoic acid (EPA), Docosahexaenoic acid (DHA) and Docosanoic acid (DCA).

[0176] In certain embodiments, the vitamin is selected from the group consisting of choline, vitamin A, vitamin E, derivatives thereof, and metabolites thereof.

[0177] In certain embodiments, the vitamin is selected from the group consisting of retinoic acid and alpha-tocopheryl succinate.

[0178] In certain embodiments, the functional moiety is linked to the antisense strand and/or sense strand by a linker.

[0179] In certain embodiments, the linker comprises a divalent or trivalent linker.

[0180] In certain embodiments, the divalent or trivalent linker is selected from the group consisting of:

[chemical structure]

wherein n is 1, 2, 3, 4, or 5.

[0181] In certain embodiments, the linker comprises an ethylene glycol chain, an alkyl chain, a peptide, an RNA, a DNA, a phosphodiester, a phosphorothioate, a phosphoramidate, an amide, a carbamate, or a combination thereof.

[0182] In certain embodiments, when the linker is a trivalent linker, the linker further links a phosphodiester or phosphodiester derivative.

[0183] In certain embodiments, the phosphodiester or phosphodiester derivative is selected from the group consisting of:

[chemical structure]

[0184] wherein X is O, S or BH₃.

[0185] In certain embodiments, the nucleotides at positions 1 and 2 from the 3′ end of sense strand, and the nucleotides at positions 1 and 2 from the 5′ end of antisense strand, are connected to adjacent ribonucleotides via phosphorothioate linkages.

[0186] In one aspect, the disclosure provides a compound of formula (I):

L-(N)ₙ (I)
[0187] wherein:
[0188] L comprises an ethylene glycol chain, an alkyl chain, a peptide, an RNA, a DNA, a phosphate, a phosphonate, a phosphoramidate, an ester, an amide, a triazole, or combinations thereof, wherein formula (I) optionally further comprises one or more branch point B, and one or more spacer S, wherein
[0189] B is independently for each occurrence a polyvalent organic species or derivative thereof;
[0190] S comprises independently for each occurrence an ethylene glycol chain, an alkyl chain, a peptide, an RNA, a DNA, a phosphate, a phosphonate, a phosphoramidate, an ester, an amide, a triazole, or a combination thereof;
[0191] n is 2, 3, 4, 5, 6, 7 or 8; and
[0192] N is a double stranded nucleic acid, such as a dsRNA molecule of any of the above aspects or embodiments of the disclosure. In certain embodiments, each N is from 15 to 40 bases in length.

[0193] In certain embodiments, each N comprises a sense strand and an antisense strand;
[0194] wherein the antisense strand comprises a sequence substantially complementary to a HTT-1A nucleic acid sequence of any one of the sequences recited in Table 18; and
[0195] wherein the sense strand and antisense strand each independently comprise one or more chemical modifications.

[0196] In certain embodiments, the compound comprises a structure selected from formulas (I-1)-(I-9):

[chemical structure]

[chemical structure]

[0197] In certain embodiments, the antisense strand comprises a 5′ terminal group R selected from the group consisting of:

[chemical structure]

[chemical structure]

[0198] In certain embodiments, the compound comprises the structure of formula (II):

[chemical structure]

[0199] wherein:
   [0200] X, for each occurrence, independently, is selected from adenosine, guanosine, uridine, cytidine, and chemically-modified derivatives thereof;
   [0201] Y, for each occurrence, independently, is selected from adenosine, guanosine, uridine, cytidine, and chemically-modified derivatives thereof;
   [0202] - represents a phosphodiester internucleoside linkage;
   [0203] = represents a phosphorothioate internucleoside linkage; and
   [0204] [symbol] represents, individually for each occurrence, a base-pairing interaction or a mismatch.

[0205] In certain embodiments, the compound comprises the structure of formula (IV):

[chemical structure]

[0206] wherein:
[0207] X, for each occurrence, independently, is selected from adenosine, guanosine, uridine, cytidine, and chemically-modified derivatives thereof;
[0208] Y, for each occurrence, independently, is selected from adenosine, guanosine, uridine, cytidine, and chemically-modified derivatives thereof;
   [0209] -represents a phosphodiester internucleoside linkage;
   [0210] = represents a phosphorothioate internucleoside linkage; and
   [0211] [symbol] represents, individually for each occurrence, a base-pairing interaction or a mismatch.

[0212] In certain embodiments, L is structure L1:

[chemical structure]

[0213] In certain embodiments, R is R³ and n is 2.

[0214] In certain embodiments, L is structure L2:

[chemical structure]

[0215] In certain embodiments, R is R³ and n is 2.

[0216] In one aspect, the disclosure provides a delivery system for therapeutic nucleic acids having the structure of Formula (VI):

L-(cNA)ₙ (VI)
[0217] wherein:
[0218] L comprises an ethylene glycol chain, an alkyl chain, a peptide, an RNA, a DNA, a phosphate, a phosphonate, a phosphoramidate, an ester, an amide, a triazole, or combinations thereof wherein formula (VI) optionally further comprises one or more branch point B, and one or more spacer S, wherein
[0219] B comprises independently for each occurrence a polyvalent organic species or derivative thereof;
[0220] S comprises independently for each occurrence an ethylene glycol chain, an alkyl chain, a peptide, RNA, DNA, a phosphate, a phosphonate, a phosphoramidate, an ester, an amide, a triazole, or combinations thereof;
[0221] each cNA, independently, is a carrier nucleic acid comprising one or more chemical modifications;
[0222] each cNA, independently, comprises at least 15 contiguous nucleotides of a HTT-1A nucleic acid sequence of any one of the sequences recited in Table 18; and
[0223] n is 2, 3, 4, 5, 6, 7 or 8.

[0224] In certain embodiments, the delivery system comprises a structure selected from formulas (VI-1)-(VI-9):

[chemical structure]

[chemical structure]

[chemical structure]

[0225] In certain embodiments, each cNA independently comprises chemically-modified nucleotides.

[0226] In certain embodiments, delivery system further comprises n therapeutic nucleic acids (NA), wherein each NA is hybridized to at least one cNA.

[0227] In certain embodiments, each NA independently comprises at least 16 contiguous nucleotides.

[0228] In certain embodiments, each NA independently comprises 16-20 contiguous nucleotides.

[0229] In certain embodiments, each NA comprises an unpaired overhang of at least 2 nucleotides.

[0230] In certain embodiments, the nucleotides of the overhang are connected via phosphorothioate linkages.

[0231] In certain embodiments, each NA, independently, is selected from the group consisting of DNAs, siRNAs, antagomiRs, miRNAs, gapmers, mixmers, and guide RNAs.

[0232] In certain embodiments, each NA is substantially complementary to a HTT-1A nucleic acid sequence of any one of the sequences recited in Table 18.

[0233] In one aspect, the disclosure provides a pharmaceutical composition for inhibiting the expression of HTT-1A gene in an organism, comprising a compound recited above or a system recited above, and a pharmaceutically acceptable carrier.

[0234] In certain embodiments, the compound or system inhibits the expression of the HTT-1A gene by at least 50%. In certain embodiments, the compound or system inhibits the expression of the HTT-1A gene by at least 80%.

[0235] In one aspect, the disclosure provides a method for inhibiting expression of HTT-1A gene in a cell, the method comprising: (a) introducing into the cell a compound recited above or a system recited above; and (b) maintaining the cell produced in step (a) for a time sufficient to obtain degradation of the mRNA transcript of the HTT-1A gene, thereby inhibiting expression of the HTT-1A gene in the cell.

[0236] In one aspect, the disclosure provides a method of treating or managing a neurodegenerative disease comprising administering to a patient in need of such treatment or management a therapeutically effective amount of a compound recited above or a system recited above.

[0237] In certain embodiments, the dsRNA is administered to the brain of the patient.

[0238] In certain embodiments, the dsRNA is administered by intracerebroventricular (ICV) injection, intrastriatal (IS) injection, intravenous (IV) injection, subcutaneous (SQ) injection, or a combination thereof.

[0239] In certain embodiments, administering the dsRNA causes a decrease in HTT-1A gene mRNA in one or more of the hippocampus, striatum, cortex, cerebellum, thalamus, hypothalamus, and spinal cord.

[0240] In certain embodiments, the dsRNA inhibits the expression of said HTT-1A gene by at least 50%. In certain embodiments, the dsRNA inhibits the expression of said HTT-1A gene by at least 80%.

### BRIEF DESCRIPTION OF THE DRAWINGS

[0241] The foregoing and other features and advantages of the present disclosure will be more fully understood from the following detailed description of illustrative embodiments taken in conjunction with the accompanying drawings. The patent or application file contains at least one drawing executed in color. Copies of this patent or patent application publication with color drawing(s) will be provided by the Office upon request and payment of the necessary fee.

[0242] FIG. 1A-FIG. 1B depict screens of siRNA sequences targeting human HTT-1A mRNA in Hela cells. Forty-seven P3 (FIG. 1A) and P5 (FIG. 1B) siRNA sequences were tested, which identified HTT-1A 779, HTT-1A 866, HTT-1A 5188, HTT-1A 6102, HTT-1A 6378 and HTT-1A 7341 as efficacious targeting regions.

[0243] FIG. 2A-FIG. 2H depict the dose response inhibition curves of HTT-1A 779, HTT-1A 866, HTT-1A 5188, and HTT-1A 6102, using the P3 sequences (FIG. 2A-FIG. 2D, respectively) and P5 sequences (FIG. 2E-FIG. 2H, respectively).

[0244] FIG. 3 depict blotting results of mouse siRNAs constructs. Numbers 1-18, 20 and 24 correspond to oligo ID numbers 316-636, 646 and 713 in Table 11.

[0245] FIG. 4 depicts a screen of siRNA's targeting sequences of mouse HTT-1A mRNA in HeLa cells, yielding multiple efficacious compounds. Results shown are representative of two independent experiments.

[0246] FIG. 5 depicts the dose response inhibition curves for HTT-1A 631, 634, and 713 siRNA, as compared to HTT 10150 siRNA, in HeLa cells. siRNA's were tested at concentrations ranging from 1.5 uM to 0.02 uM, in al:2 dilution series. Results shown are representative of two independent experiments.

[0247] FIG. 6 depicts relative WT HTT and mutant HTT protein levels in the mouse striatum, medial cortex, posterior cortex, and thalamus after receiving siRNA targeting HTT or HTT1a. Mice were given a 10 nmol dose of the siRNA in a 10 μl volume, administered via an intracerebroventricular (ICV) route. No treatment control mice were used for comparison.

[0248] FIG. 7 depicts relative WT HTT and mutant HTT protein levels in the mouse striatum, medial cortex, posterior cortex, and thalamus, after receiving siRNA targeting HTT or HTT1a.

[0249] FIG. 8 depicts a screen of siRNA sequences targeting human HTT-1A mRNA in MEF cells from YAC128 mice. siRNAs were tested at 1.5 μM. siRNAs targeting HTT-1A mRNA regions designated HTT-1A 424, HTT-1A 434, HTT-1A 452, HTT-1A 515, HTT-1A 596, HTT-1A 601, HTT-1A 620, and HTT-1A 659 achieved the highest silencing efficacy.

[0250] FIG. 9 depicts a repeat of the screen of siRNA sequences shown in FIG. 1A and FIG. 1B in MEF cells from YAC128 mice. siRNAs were tested at 1.5 μM. siRNAs targeting HTT-1A mRNA regions designated HTT-1A 757, HTT-1A 774, HTT-1A 779, HTT-1A 866, HTT-1A 1102, HTT-1A 1654, HTT-1A 1799, HTT-1A 1864, and HTT-1A 1940 achieved the highest silencing efficacy.

[0251] FIG. 10A-FIG. 10G depict the dose response inhibition curves of HTT-1A 424, HTT-1A 434, HTT-1A 452, HTT-1A 515, HTT-1A 779, HTT-1A 1654, and HTT-1A 1799 in MEF cells from YAC 128 mice.

[0252] FIG. 11 depicts relative HTT1a, HTT and Htt levels in mouse cortex after receiving siRNA. HTT1a_1654 was found to induce statistically significant silencing of HTT1a.

[0253] FIG. 12A depicts schematics of siRNA chemical modifications patterns.

[0254] FIG. 12B depicts a screen of siRNA sequences targeting human HTT-1A mRNA in MEF cells from YAC128 mice. siRNAs were tested at 1.5 μM.

[0255] FIG. 13 depicts a screen of siRNA sequences targeting human HTT-1A mRNA in MEF cells from YAC128 mice. siRNAs were tested at 1.5 μM

[0256] FIG. 14A-FIG. 14D depict the dose response inhibition curve of HTT-1A 1664, HTT-1A 1665, and HTT-1A 1666 in MEF cells from YAC 128 mice. Results were not normalized to Hprt, due to technical variation, in the process of repeating

### DETAILED DESCRIPTION

[0257] Novel HTT-1A (HTT1a) target sequences are provided. Also provided are novel RNA molecules, such as siRNAs and branched RNA compounds containing the same, that target the HTT-1A mRNA, such as one or more target sequences of the disclosure.

[0258] Unless otherwise specified, nomenclature used in connection with cell and tissue culture, molecular biology, immunology, microbiology, genetics and protein and nucleic acid chemistry and hybridization described herein are those well-known and commonly used in the art. Unless otherwise specified, the methods and techniques provided herein are performed according to conventional methods well known in the art and as described in various general and more specific references that are cited and discussed throughout the present specification unless otherwise indicated. Enzymatic reactions and purification techniques are performed according to manufacturer's specifications, as commonly accomplished in the art or as described herein. The nomenclature used in connection with, and the laboratory procedures and techniques of, analytical chemistry, synthetic organic chemistry, and medicinal and pharmaceutical chemistry described herein are those well-known and commonly used in the art. Standard techniques are used for chemical syntheses, chemical analyses, pharmaceutical preparation, formulation, delivery, and treatment of patients.

[0259] Unless otherwise defined herein, scientific and technical terms used herein have the meanings that are commonly understood by those of ordinary skill in the art. In the event of any latent ambiguity, definitions provided herein take precedent over any dictionary or extrinsic definition. Unless otherwise required by context, singular terms shall include pluralities and plural terms shall include the singular. The use of “or” means “and/or” unless stated otherwise. The use of the term “including,” as well as other forms, such as “includes” and “included,” is not limiting.

[0260] So that the invention may be more readily understood, certain terms are first defined.

[0261] The term “nucleoside” refers to a molecule having a purine or pyrimidine base covalently linked to a ribose or deoxyribose sugar. Exemplary nucleosides include adenosine, guanosine, cytidine, uridine and thymidine. Additional exemplary nucleosides include inosine, 1-methyl inosine, pseudouridine, 5,6-dihydrouridine, ribothymidine, 2N-methylguanosine and N2,N2-dimethylguanosine (also referred to as “rare” nucleosides). The term “nucleotide” refers to a nucleoside having one or more phosphate groups joined in ester linkages to the sugar moiety. Exemplary nucleotides include nucleoside monophosphates, diphosphates and triphosphates. The terms “polynucleotide” and “nucleic acid molecule” are used interchangeably herein and refer to a polymer of nucleotides joined together by a phosphodiester or phosphorothioate linkage between 5′ and 3′ carbon atoms.

[0262] The term “RNA” or “RNA molecule” or “ribonucleic acid molecule” refers to a polymer of ribonucleotides (e.g., 2, 3, 4, 5, 10, 15, 20, 25, 30, or more ribonucleotides). The term “DNA” or “DNA molecule” or “deoxyribonucleic acid molecule” refers to a polymer of deoxyribonucleotides. DNA and RNA can be synthesized naturally (e.g., by DNA replication or transcription of DNA, respectively). RNA can be post-transcriptionally modified. DNA and RNA can also be chemically synthesized. DNA and RNA can be single-stranded (i.e., ssRNA and ssDNA, respectively) or multi-stranded (e.g., double stranded, i.e., dsRNA and dsDNA, respectively). “mRNA” or “messenger RNA” is single-stranded RNA that specifies the amino acid sequence of one or more polypeptide chains. This information is translated during protein synthesis when ribosomes bind to the mRNA.

[0263] As used herein, the term “small interfering RNA” (“siRNA”) (also referred to in the art as “short interfering RNAs”) refers to an RNA (or RNA analog) comprising between about 10-50 nucleotides (or nucleotide analogs), which is capable of directing or mediating RNA interference. In certain embodiments, a siRNA comprises between about 15-30 nucleotides or nucleotide analogs, or between about 16-25 nucleotides (or nucleotide analogs), or between about 18-23 nucleotides (or nucleotide analogs), or between about 19-22 nucleotides (or nucleotide analogs) (e.g., 19, 20, 21 or 22 nucleotides or nucleotide analogs). The term “short” siRNA refers to a siRNA comprising about 21 nucleotides (or nucleotide analogs), for example, 19, 20, 21 or 22 nucleotides. The term “long” siRNA refers to a siRNA comprising about 24-25 nucleotides, for example, 23, 24, 25 or 26 nucleotides. Short siRNAs may, in some instances, include fewer than 19 nucleotides, e.g., 16, 17 or 18 nucleotides, provided that the shorter siRNA retains the ability to mediate RNAi. Likewise, long siRNAs may, in some instances, include more than 26 nucleotides, provided that the longer siRNA retains the ability to mediate RNAi absent further processing, e.g., enzymatic processing, to a short siRNA.

[0264] The term “nucleotide analog” or “altered nucleotide” or “modified nucleotide” refers to a non-standard nucleotide, including non-naturally occurring ribonucleotides or deoxyribonucleotides. Exemplary nucleotide analogs are modified at any position so as to alter certain chemical properties of the nucleotide yet retain the ability of the nucleotide analog to perform its intended function. Examples of positions of the nucleotide, which may be derivatized include: the 5 position, e.g., 5-(2-amino)propyl uridine, 5-bromo uridine, 5-propyne uridine, 5-propenyl uridine, etc.; the 6 position, e.g., 6-(2-amino)propyl uridine; and the 8-position for adenosine and/or guanosines, e.g., 8-bromo guanosine, 8-chloro guanosine, 8-fluoroguanosine, etc. Nucleotide analogs also include deaza nucleotides, e.g., 7-deaza-adenosine; O- and N-modified (e.g., alkylated, e.g., N6-methyl adenosine, or as otherwise known in the art) nucleotides; and other heterocyclically modified nucleotide analogs, such as those described in Herdewijn, Antisense Nucleic Acid Drug Dev., 2000 Aug. 10(4):297-310.

[0265] Nucleotide analogs may also comprise modifications to the sugar portion of the nucleotides. For example, the 2′ OH-group may be replaced by a group selected from H, OR, R, F, Cl, Br, I, SH, SR, NH₂, NHR, NR₂, or COOR, wherein R is substituted or unsubstituted C₁-C₆ alkyl, alkenyl, alkynyl, aryl, etc. Other possible modifications include those described in U.S. Pat. Nos. 5,858,988, and 6,291,438.

[0266] The phosphate group of the nucleotide may also be modified, e.g., by substituting one or more of the oxygens of the phosphate group with sulfur (e.g., phosphorothioates), or by making other substitutions, which allow the nucleotide to perform its intended function, such as described in, for example, Eckstein, Antisense Nucleic Acid Drug Dev. 2000 Apr. 10(2):117-21, Rusckowski et al. Antisense Nucleic Acid Drug Dev. 2000 Oct. 10(5):333-45, Stein, Antisense Nucleic Acid Drug Dev. 2001 Oct. 11(5): 317-25, Vorobjev et al. Antisense Nucleic Acid Drug Dev. 2001 Apr. 11(2):77-85, and U.S. Pat. No. 5,684,143. Certain of the above-referenced modifications (e.g., phosphate group modifications) decrease the rate of hydrolysis of, for example, polynucleotides comprising said analogs in vivo or in vitro.

[0267] The term “oligonucleotide” refers to a short polymer of nucleotides and/or nucleotide analogs.

[0268] The term “RNA analog” refers to a polynucleotide (e.g., a chemically synthesized polynucleotide) having at least one altered or modified nucleotide as compared to a corresponding unaltered or unmodified RNA, but retaining the same or similar nature or function as the corresponding unaltered or unmodified RNA. As discussed above, the oligonucleotides may be linked with linkages, which result in a lower rate of hydrolysis of the RNA analog as compared to an RNA molecule with phosphodiester linkages. For example, the nucleotides of the analog may comprise methylenediol, ethylene diol, oxymethylthio, oxyethylthio, oxycarbonyloxy, phosphorodiamidate, phosphoroamidate, and/or phosphorothioate linkages. Some RNA analogues include sugar- and/or backbone-modified ribonucleotides and/or deoxyribonucleotides. Such alterations or modifications can further include addition of non-nucleotide material, such as to the end(s) of the RNA or internally (at one or more nucleotides of the RNA). An RNA analog need only be sufficiently similar to natural RNA that it has the ability to mediate RNA interference.

[0269] As used herein, the term “RNA interference” (“RNAi”) refers to a selective intracellular degradation of RNA. RNAi occurs in cells naturally to remove foreign RNAs (e.g., viral RNAs). Natural RNAi proceeds via fragments cleaved from free dsRNA, which direct the degradative mechanism to other similar RNA sequences. Alternatively, RNAi can be initiated by the hand of man, for example, to silence the expression of target genes.

[0270] An RNAi agent, e.g., an RNA silencing agent, having a strand, which is “sequence sufficiently complementary to a target mRNA sequence to direct target-specific RNA interference (RNAi)” means that the strand has a sequence sufficient to trigger the destruction of the target mRNA by the RNAi machinery or process.

[0271] As used herein, the term “isolated RNA” (e.g., “isolated siRNA” or “isolated siRNA precursor”) refers to RNA molecules, which are substantially free of other cellular material, or culture medium when produced by recombinant techniques, or substantially free of chemical precursors or other chemicals when chemically synthesized.

[0272] As used herein, the term “RNA silencing” refers to a group of sequence-specific regulatory mechanisms (e.g. RNA interference (RNAi), transcriptional gene silencing (TGS), post-transcriptional gene silencing (PTGS), quelling, co-suppression, and translational repression) mediated by RNA molecules, which result in the inhibition or “silencing” of the expression of a corresponding protein-coding gene. RNA silencing has been observed in many types of organisms, including plants, animals, and fungi.

[0273] The term “discriminatory RNA silencing” refers to the ability of an RNA molecule to substantially inhibit the expression of a “first” or “target” polynucleotide sequence while not substantially inhibiting the expression of a “second” or “non-target” polynucleotide sequence,” e.g., when both polynucleotide sequences are present in the same cell. In certain embodiments, the target polynucleotide sequence corresponds to a target gene, while the non-target polynucleotide sequence corresponds to a non-target gene. In other embodiments, the target polynucleotide sequence corresponds to a target allele, while the non-target polynucleotide sequence corresponds to a non-target allele. In certain embodiments, the target polynucleotide sequence is the DNA sequence encoding the regulatory region (e.g. promoter or enhancer elements) of a target gene. In other embodiments, the target polynucleotide sequence is a target mRNA encoded by a target gene.

[0274] The term “in vitro” has its art recognized meaning, e.g., involving purified reagents or extracts, e.g., cell extracts. The term “in vivo” also has its art recognized meaning, e.g., involving living cells, e.g., immortalized cells, primary cells, cell lines, and/or cells in an organism.

[0275] As used herein, the term “transgene” refers to any nucleic acid molecule, which is inserted by artifice into a cell, and becomes part of the genome of the organism that develops from the cell. Such a transgene may include a gene that is partly or entirely heterologous (i.e., foreign) to the transgenic organism, or may represent a gene homologous to an endogenous gene of the organism. The term “transgene” also means a nucleic acid molecule that includes one or more selected nucleic acid sequences, e.g., DNAs, that encode one or more engineered RNA precursors, to be expressed in a transgenic organism, e.g., animal, which is partly or entirely heterologous, i.e., foreign, to the transgenic animal, or homologous to an endogenous gene of the transgenic animal, but which is designed to be inserted into the animal's genome at a location which differs from that of the natural gene. A transgene includes one or more promoters and any other DNA, such as introns, necessary for expression of the selected nucleic acid sequence, all operably linked to the selected sequence, and may include an enhancer sequence.

[0276] A gene “involved” in a disease or disorder includes a gene, the normal or aberrant expression or function of which effects or causes the disease or disorder or at least one symptom of said disease or disorder.

[0277] The term “gain-of-function mutation” as used herein, refers to any mutation in a gene in which the protein encoded by said gene (i.e., the mutant protein) acquires a function not normally associated with the protein (i.e., the wild type protein) and causes or contributes to a disease or disorder. The gain-of-function mutation can be a deletion, addition, or substitution of a nucleotide or nucleotides in the gene, which gives rise to the change in the function of the encoded protein. In one embodiment, the gain-of-function mutation changes the function of the mutant protein or causes interactions with other proteins. In another embodiment, the gain-of-function mutation causes a decrease in or removal of normal wild-type protein, for example, by interaction of the altered, mutant protein with said normal, wild-type protein.

[0278] As used herein, the term “target gene” is a gene whose expression is to be substantially inhibited or “silenced.” This silencing can be achieved by RNA silencing, e.g., by cleaving the mRNA of the target gene or translational repression of the target gene. The term “non-target gene” is a gene whose expression is not to be substantially silenced. In one embodiment, the polynucleotide sequences of the target and non-target gene (e.g. mRNA encoded by the target and non-target genes) can differ by one or more nucleotides. In another embodiment, the target and non-target genes can differ by one or more polymorphisms (e.g., Single Nucleotide Polymorphisms or SNPs). In another embodiment, the target and non-target genes can share less than 100% sequence identity. In another embodiment, the non-target gene may be a homologue (e.g. an orthologue or paralogue) of the target gene.

[0279] A “target allele” is an allele (e.g., a SNP allele) whose expression is to be selectively inhibited or “silenced.” This silencing can be achieved by RNA silencing, e.g., by cleaving the mRNA of the target gene or target allele by a siRNA. The term “non-target allele” is an allele whose expression is not to be substantially silenced. In certain embodiments, the target and non-target alleles can correspond to the same target gene. In other embodiments, the target allele corresponds to, or is associated with, a target gene, and the non-target allele corresponds to, or is associated with, a non-target gene. In one embodiment, the polynucleotide sequences of the target and non-target alleles can differ by one or more nucleotides. In another embodiment, the target and non-target alleles can differ by one or more allelic polymorphisms (e.g., one or more SNPs). In another embodiment, the target and non-target alleles can share less than 100% sequence identity.

[0280] The term “polymorphism” as used herein, refers to a variation (e.g., one or more deletions, insertions, or substitutions) in a gene sequence that is identified or detected when the same gene sequence from different sources or subjects (but from the same organism) are compared. For example, a polymorphism can be identified when the same gene sequence from different subjects are compared. Identification of such polymorphisms is routine in the art, the methodologies being similar to those used to detect, for example, breast cancer point mutations. Identification can be made, for example, from DNA extracted from a subject's lymphocytes, followed by amplification of polymorphic regions using specific primers to said polymorphic region. Alternatively, the polymorphism can be identified when two alleles of the same gene are compared. In certain embodiments, the polymorphism is a single nucleotide polymorphism (SNP).

[0281] A variation in sequence between two alleles of the same gene within an organism is referred to herein as an “allelic polymorphism.” In certain embodiments, the allelic polymorphism corresponds to a SNP allele. For example, the allelic polymorphism may comprise a single nucleotide variation between the two alleles of a SNP. The polymorphism can be at a nucleotide within a coding region but, due to the degeneracy of the genetic code, no change in amino acid sequence is encoded. Alternatively, polymorphic sequences can encode a different amino acid at a particular position, but the change in the amino acid does not affect protein function. Polymorphic regions can also be found in non-encoding regions of the gene. In exemplary embodiments, the polymorphism is found in a coding region of the gene or in an untranslated region (e.g., a 5′ UTR or 3′ UTR) of the gene.

[0282] As used herein, the term “allelic frequency” is a measure (e.g., proportion or percentage) of the relative frequency of an allele (e.g., a SNP allele) at a single locus in a population of individuals. For example, where a population of individuals carry n loci of a particular chromosomal locus (and the gene occupying the locus) in each of their somatic cells, then the allelic frequency of an allele is the fraction or percentage of loci that the allele occupies within the population. In certain embodiments, the allelic frequency of an allele (e.g., an SNP allele) is at least 10% (e.g., at least 15%, 20%, 25%, 30%, 35%, 40% or more) in a sample population.

[0283] As used herein, the term “sample population” refers to a population of individuals comprising a statistically significant number of individuals. For example, the sample population may comprise 50, 75, 100, 200, 500, 1000 or more individuals. In certain embodiments, the sample population may comprise individuals, which share at least on common disease phenotype (e.g., a gain-of-function disorder) or mutation (e.g., a gain-of-function mutation).

[0284] As used herein, the term “heterozygosity” refers to the fraction of individuals within a population that are heterozygous (e.g., contain two or more different alleles) at a particular locus (e.g., at a SNP). Heterozygosity may be calculated for a sample population using methods that are well known to those skilled in the art.

[0285] The term “polyglutamine domain,” as used herein, refers to a segment or domain of a protein that consist of consecutive glutamine residues linked to peptide bonds. In one embodiment the consecutive region includes at least 5 glutamine residues.

[0286] As described herein, the term “HTT” refers to the gene encoding for the protein huntingtin. The HTT gene is located on chromosome 4p16.3. The huntingtin locus is large, spanning 180 kb and consisting of 67 exons. The gene is expressed as 2 alternatively polyadenylated forms displaying different relative abundance in various fetal and adult tissues. The larger transcript is approximately 13.7 kb and is expressed predominantly in adult and fetal brain whereas the smaller transcript of approximately 10.3 kb is more widely expressed. The huntingtin protein is approximately 3142 amino acids in length and has a molecular mass of approximately 347603 Da.

[0287] The term “expanded polyglutamine domain” or “expanded polyglutamine segment,” as used herein, refers to a segment or domain of a protein that includes at least 35 consecutive glutamine residues linked by peptide bonds. Such expanded segments are found in subjects afflicted with a polyglutamine disorder, as described herein, whether or not the subject manifests symptoms.

[0288] The term “trinucleotide repeat” or “trinucleotide repeat region” as used herein, refers to a segment of a nucleic acid sequence that consists of consecutive repeats of a particular trinucleotide sequence. In one embodiment, the trinucleotide repeat includes at least 5 consecutive trinucleotide sequences. Exemplary trinucleotide sequences include, but are not limited to, CAG, CGG, GCC, GAA, CTG and/or CGG.

[0289] The term “trinucleotide repeat diseases” as used herein, refers to any disease or disorder characterized by an expanded trinucleotide repeat region located within a gene, the expanded trinucleotide repeat region being causative of the disease or disorder. Examples of trinucleotide repeat diseases include, but are not limited to Huntington's disease (HD), spino-cerebellar ataxia type 12 spino-cerebellar ataxia type 8, fragile X syndrome, fragile XE mental retardation, Friedreich's ataxia and myotonic dystrophy. Exemplary trinucleotide repeat diseases for treatment according to the present invention are those characterized or caused by an expanded trinucleotide repeat region at the 5′ end of the coding region of a gene, the gene encoding a mutant protein, which causes or is causative of the disease or disorder. Certain trinucleotide diseases, for example, fragile X syndrome, where the mutation is not associated with a coding region, may not be suitable for treatment according to the methodologies of the present invention, as there is no suitable mRNA to be targeted by RNAi. By contrast, disease such as Friedreich's ataxia may be suitable for treatment according to the methodologies of the invention because, although the causative mutation is not within a coding region (i.e., lies within an intron), the mutation may be within, for example, an mRNA precursor (e.g., a pre-spliced mRNA precursor).

[0290] The phrase “examining the function of a gene in a cell or organism” refers to examining or studying the expression, activity, function or phenotype arising therefrom.

[0291] As used herein, the term “RNA silencing agent” refers to an RNA, which is capable of inhibiting or “silencing” the expression of a target gene. In certain embodiments, the RNA silencing agent is capable of preventing complete processing (e.g., the full translation and/or expression) of a mRNA molecule through a post-transcriptional silencing mechanism. RNA silencing agents include small (<50 b.p.), noncoding RNA molecules, for example RNA duplexes comprising paired strands, as well as precursor RNAs from which such small non-coding RNAs can be generated. Exemplary RNA silencing agents include siRNAs, miRNAs, siRNA-like duplexes, antisense oligonucleotides, GAPMER molecules, and dual-function oligonucleotides, as well as precursors thereof. In one embodiment, the RNA silencing agent is capable of inducing RNA interference. In another embodiment, the RNA silencing agent is capable of mediating translational repression.

[0292] As used herein, the term “rare nucleotide” refers to a naturally occurring nucleotide that occurs infrequently, including naturally occurring deoxyribonucleotides or ribonucleotides that occur infrequently, e.g., a naturally occurring ribonucleotide that is not guanosine, adenosine, cytosine, or uridine. Examples of rare nucleotides include, but are not limited to, inosine, 1-methyl inosine, pseudouridine, 5,6-dihydrouridine, ribothymidine, 2N-methylguanosine and 2,2N,N-dimethylguanosine.

[0293] The term “engineered,” as in an engineered RNA precursor, or an engineered nucleic acid molecule, indicates that the precursor or molecule is not found in nature, in that all or a portion of the nucleic acid sequence of the precursor or molecule is created or selected by a human. Once created or selected, the sequence can be replicated, translated, transcribed, or otherwise processed by mechanisms within a cell. Thus, an RNA precursor produced within a cell from a transgene that includes an engineered nucleic acid molecule is an engineered RNA precursor.

[0294] As used herein, the term “microRNA” (“miRNA”), also known in the art as “small temporal RNAs” (“stRNAs”), refers to a small (10-50 nucleotide) RNA, which are genetically encoded (e.g., by viral, mammalian, or plant genomes) and are capable of directing or mediating RNA silencing. An “miRNA disorder” shall refer to a disease or disorder characterized by an aberrant expression or activity of a miRNA.

[0295] As used herein, the term “dual functional oligonucleotide” refers to a RNA silencing agent having the formula T-L-μ, wherein T is an mRNA targeting moiety, L is a linking moiety, and μ is a miRNA recruiting moiety. As used herein, the terms “mRNA targeting moiety,” “targeting moiety,” “mRNA targeting portion” or “targeting portion” refer to a domain, portion or region of the dual functional oligonucleotide having sufficient size and sufficient complementarity to a portion or region of an mRNA chosen or targeted for silencing (i.e., the moiety has a sequence sufficient to capture the target mRNA).

[0296] As used herein, the term “linking moiety” or “linking portion” refers to a domain, portion or region of the RNA-silencing agent which covalently joins or links the mRNA.

[0297] As used herein, the term “antisense strand” of an RNA silencing agent, e.g., an siRNA or RNA silencing agent, refers to a strand that is substantially complementary to a section of about 10-50 nucleotides, e.g., about 15-30, 16-25, 18-23 or 19-22 nucleotides of the mRNA of the gene targeted for silencing. The antisense strand or first strand has sequence sufficiently complementary to the desired target mRNA sequence to direct target-specific silencing, e.g., complementarity sufficient to trigger the destruction of the desired target mRNA by the RNAi machinery or process (RNAi interference) or complementarity sufficient to trigger translational repression of the desired target mRNA.

[0298] The term “sense strand” or “second strand” of an RNA silencing agent, e.g., an siRNA or RNA silencing agent, refers to a strand that is complementary to the antisense strand or first strand. Antisense and sense strands can also be referred to as first or second strands, the first or second strand having complementarity to the target sequence and the respective second or first strand having complementarity to said first or second strand. miRNA duplex intermediates or siRNA-like duplexes include a miRNA strand having sufficient complementarity to a section of about 10-50 nucleotides of the mRNA of the gene targeted for silencing and a miRNA* strand having sufficient complementarity to form a duplex with the miRNA strand.

[0299] As used herein, the term “guide strand” refers to a strand of an RNA silencing agent, e.g., an antisense strand of an siRNA duplex or siRNA sequence, that enters into the RISC complex and directs cleavage of the target mRNA.

[0300] As used herein, the term “asymmetry,” as in the asymmetry of the duplex region of an RNA silencing agent (e.g., the stem of an shRNA), refers to an inequality of bond strength or base pairing strength between the termini of the RNA silencing agent (e.g., between terminal nucleotides on a first strand or stem portion and terminal nucleotides on an opposing second strand or stem portion), such that the 5′ end of one strand of the duplex is more frequently in a transient unpaired, e.g., single-stranded, state than the 5′ end of the complementary strand. This structural difference determines that one strand of the duplex is preferentially incorporated into a RISC complex. The strand whose 5′ end is less tightly paired to the complementary strand will preferentially be incorporated into RISC and mediate RNAi.

[0301] As used herein, the term “bond strength” or “base pair strength” refers to the strength of the interaction between pairs of nucleotides (or nucleotide analogs) on opposing strands of an oligonucleotide duplex (e.g., an siRNA duplex), due primarily to H-bonding, van der Waals interactions, and the like, between said nucleotides (or nucleotide analogs).

[0302] As used herein, the “5′ end,” as in the 5′ end of an antisense strand, refers to the 5′ terminal nucleotides, e.g., between one and about 5 nucleotides at the 5′ terminus of the antisense strand. As used herein, the “3′ end,” as in the 3′ end of a sense strand, refers to the region, e.g., a region of between one and about 5 nucleotides, that is complementary to the nucleotides of the 5′ end of the complementary antisense strand.

[0303] As used herein the term “destabilizing nucleotide” refers to a first nucleotide or nucleotide analog capable of forming a base pair with second nucleotide or nucleotide analog such that the base pair is of lower bond strength than a conventional base pair (i.e., Watson-Crick base pair). In certain embodiments, the destabilizing nucleotide is capable of forming a mismatch base pair with the second nucleotide. In other embodiments, the destabilizing nucleotide is capable of forming a wobble base pair with the second nucleotide. In yet other embodiments, the destabilizing nucleotide is capable of forming an ambiguous base pair with the second nucleotide.

[0304] As used herein, the term “base pair” refers to the interaction between pairs of nucleotides (or nucleotide analogs) on opposing strands of an oligonucleotide duplex (e.g., a duplex formed by a strand of a RNA silencing agent and a target mRNA sequence), due primarily to H-bonding, van der Waals interactions, and the like between said nucleotides (or nucleotide analogs). As used herein, the term “bond strength” or “base pair strength” refers to the strength of the base pair.

[0305] As used herein, the term “mismatched base pair” refers to a base pair consisting of non-complementary or non-Watson-Crick base pairs, for example, not normal complementary G:C, A:T or A:U base pairs. As used herein the term “ambiguous base pair” (also known as a non-discriminatory base pair) refers to a base pair formed by a universal nucleotide.

[0306] As used herein, term “universal nucleotide” (also known as a “neutral nucleotide”) include those nucleotides (e.g. certain destabilizing nucleotides) having a base (a “universal base” or “neutral base”) that does not significantly discriminate between bases on a complementary polynucleotide when forming a base pair. Universal nucleotides are predominantly hydrophobic molecules that can pack efficiently into antiparallel duplex nucleic acids (e.g., double-stranded DNA or RNA) due to stacking interactions. The base portion of universal nucleotides typically comprise a nitrogen-containing aromatic heterocyclic moiety.

[0307] As used herein, the terms “sufficient complementarity” or “sufficient degree of complementarity” mean that the RNA silencing agent has a sequence (e.g. in the antisense strand, mRNA targeting moiety or miRNA recruiting moiety), which is sufficient to bind the desired target RNA, respectively, and to trigger the RNA silencing of the target mRNA.

[0308] As used herein, the term “translational repression” refers to a selective inhibition of mRNA translation. Natural translational repression proceeds via miRNAs cleaved from shRNA precursors. Both RNAi and translational repression are mediated by RISC. Both RNAi and translational repression occur naturally or can be initiated by the hand of man, for example, to silence the expression of target genes.

[0309] Various methodologies of the instant application include a step that involves comparing a value, level, feature, characteristic, property, etc. to a “suitable control,” referred to interchangeably herein as an “appropriate control.” A “suitable control” or “appropriate control” is any control or standard familiar to one of ordinary skill in the art useful for comparison purposes. In one embodiment, a “suitable control” or “appropriate control” is a value, level, feature, characteristic, property, etc. determined prior to performing an RNAi methodology, as described herein. For example, a transcription rate, mRNA level, translation rate, protein level, biological activity, cellular characteristic or property, genotype, phenotype, etc. can be determined prior to introducing an RNA silencing agent of the invention into a cell or organism. In another embodiment, a “suitable control” or “appropriate control” is a value, level, feature, characteristic, property, etc. determined in a cell or organism, e.g., a control or normal cell or organism, exhibiting, for example, normal traits. In yet another embodiment, a “suitable control” or “appropriate control” is a predefined value, level, feature, characteristic, property, etc.

[0310] Unless otherwise defined, all technical and scientific terms used herein have the same meaning as commonly understood by one of ordinary skill in the art to which this invention belongs. Although methods and materials similar or equivalent to those described herein can be used in the practice or testing of the present invention, suitable methods and materials are described below. All publications, patent applications, patents, and other references mentioned herein are incorporated by reference in their entirety. In case of conflict, the present specification, including definitions, will control. In addition, the materials, methods, and example are illustrative only and not intended to be limiting.

[0311] Various aspects of the invention are described in further detail in the following subsections.

### I. Novel Target Sequences

[0312] RNA silencing agents capable of targeting and silencing HTT-1A were described previously in U.S. Provisional Patent Application Ser. No. 63/060,369, filed Aug. 3, 2020 and U.S. Provisional Patent Application No. 63/177,067, filed Apr. 20, 2021, each of which are hereby incorporated herein by reference. Additional RNA silencing agents capable of targeting and silencing HTT-1A are described herein. Exemplary target regions of the HTT-1A gene are recited in Table 18. Exemplary mRNA target sequences are recited in Table 19.

[0313] Genomic sequence for each target sequence can be found in, for example, the publicly available database maintained by the NCBI.

II. siRNA Design

[0314] In some embodiments, siRNAs are designed as follows. First, a portion of the target gene (e.g., the HTT-1A gene), e.g., one or more of the target sequences set forth in Table 18 is selected. Cleavage of mRNA at these sites should eliminate translation of corresponding protein. Antisense strands were designed based on the target sequence and sense strands were designed to be complementary to the antisense strand. Hybridization of the antisense and sense strands forms the siRNA duplex. The antisense strand includes about 19 to 25 nucleotides, e.g., 19, 20, 21, 22, 23, 24 or 25 nucleotides. In other embodiments, the antisense strand includes 20, 21, 22 or 23 nucleotides. The sense strand includes about 14 to 25 nucleotides, e.g., 14, 15, 16, 17, 18, 19, 20, 21, 22, 23, 24 or 25 nucleotides. In other embodiments, the sense strand is 15 nucleotides. In other embodiments, the sense strand is 18 nucleotides. In other embodiments, the sense strand is 20 nucleotides. The skilled artisan will appreciate, however, that siRNAs having a length of less than 19 nucleotides or greater than 25 nucleotides can also function to mediate RNAi. Accordingly, siRNAs of such length are also within the scope of the instant invention, provided that they retain the ability to mediate RNAi. Longer RNAi agents have been demonstrated to elicit an interferon or PKR response in certain mammalian cells, which may be undesirable. In certain embodiments, the RNAi agents of the invention do not elicit a PKR response (i.e., are of a sufficiently short length). However, longer RNAi agents may be useful, for example, in cell types incapable of generating a PKR response or in situations where the PKR response has been down-regulated or dampened by alternative means.

[0315] The sense strand sequence can be designed such that the target sequence is essentially in the middle of the strand. Moving the target sequence to an off-center position can, in some instances, reduce efficiency of cleavage by the siRNA. Such compositions, i.e., less efficient compositions, may be desirable for use if off-silencing of the wild-type mRNA is detected.

[0316] The antisense strand can be the same length as the sense strand and includes complementary nucleotides. In one embodiment, the strands are fully complementary, i.e., the strands are blunt-ended when aligned or annealed. In another embodiment, the strands align or anneal such that 1-, 2-, 3-, 4-, 5-, 6-, 7-, or 8-nucleotide overhangs are generated, i.e., the 3′ end of the sense strand extends 1, 2, 3, 4, 5, 6, 7, or 8 nucleotides further than the 5′ end of the antisense strand and/or the 3′ end of the antisense strand extends 1, 2, 3, 4, 5, 6, 7, or 8 nucleotides further than the 5′ end of the sense strand. Overhangs can comprise (or consist of) nucleotides corresponding to the target gene sequence (or complement thereof). Alternatively, overhangs can comprise (or consist of) deoxyribonucleotides, for example dTs, or nucleotide analogs, or other suitable non-nucleotide material.

[0317] To facilitate entry of the antisense strand into RISC (and thus increase or improve the efficiency of target cleavage and silencing), the base pair strength between the 5′ end of the sense strand and 3′ end of the antisense strand can be altered, e.g., lessened or reduced, as described in detail in U.S. Pat. Nos. 7,459,547, 7,772,203 and 7,732,593, entitled “Methods and Compositions for Controlling Efficacy of RNA Silencing” (filed Jun. 2, 2003) and U.S. Pat. Nos. 8,309,704, 7,750,144, 8,304,530, 8,329,892 and 8,309,705, entitled “Methods and Compositions for Enhancing the Efficacy and Specificity of RNAi” (filed Jun. 2, 2003), the contents of which are incorporated in their entirety by this reference. In one embodiment of these aspects of the invention, the base-pair strength is less due to fewer G:C base pairs between the 5′ end of the first or antisense strand and the 3′ end of the second or sense strand than between the 3′ end of the first or antisense strand and the 5′ end of the second or sense strand. In another embodiment, the base pair strength is less due to at least one mismatched base pair between the 5′ end of the first or antisense strand and the 3′ end of the second or sense strand. In certain exemplary embodiments, the mismatched base pair is selected from the group consisting of G:A, C:A, C:U, G:G, A:A, C:C and U:U. In another embodiment, the base pair strength is less due to at least one wobble base pair, e.g., G:U, between the 5′ end of the first or antisense strand and the 3′ end of the second or sense strand. In another embodiment, the base pair strength is less due to at least one base pair comprising a rare nucleotide, e.g., inosine (I). In certain exemplary embodiments, the base pair is selected from the group consisting of an I:A, I:U and I:C. In yet another embodiment, the base pair strength is less due to at least one base pair comprising a modified nucleotide. In certain exemplary embodiments, the modified nucleotide is selected from the group consisting of 2-amino-G, 2-amino-A, 2,6-diamino-G, and 2,6-diamino-A.

[0318] The design of siRNAs suitable for targeting the HTT-1A target sequences set forth in Table 18 is described in detail below. siRNAs can be designed according to the above exemplary teachings for any other target sequences found in the HTT-1A gene. Moreover, the technology is applicable to targeting any other target sequences, e.g., non-disease-causing target sequences.

[0319] To validate the effectiveness by which siRNAs destroy mRNAs (e.g., HTT-1A mRNA), the siRNA can be incubated with cDNA (e.g., HTT-1A cDNA) in a Drosophila-based in vitro mRNA expression system. Radiolabeled with ³²P, newly synthesized mRNAs (e.g., HTT-1A mRNA) are detected autoradiographically on an agarose gel. The presence of cleaved mRNA indicates mRNA nuclease activity. Suitable controls include omission of siRNA. Alternatively, control siRNAs are selected having the same nucleotide composition as the selected siRNA, but without significant sequence complementarity to the appropriate target gene. Such negative controls can be designed by randomly scrambling the nucleotide sequence of the selected siRNA; a homology search can be performed to ensure that the negative control lacks homology to any other gene in the appropriate genome. In addition, negative control siRNAs can be designed by introducing one or more base mismatches into the sequence. Sites of siRNA-mRNA complementation are selected which result in optimal mRNA specificity and maximal mRNA cleavage.

### III. RNAi Agents

[0320] The present invention includes RNAi molecules, such as siRNA molecules designed, for example, as described above. The siRNA molecules of the invention can be chemically synthesized, or can be transcribed in vitro from a DNA template, or in vivo from e.g., shRNA, or by using recombinant human DICER enzyme, to cleave in vitro transcribed dsRNA templates into pools of 20-, 21- or 23-bp duplex RNA mediating RNAi. The siRNA molecules can be designed using any method known in the art.

[0321] In one aspect, instead of the RNAi agent being an interfering ribonucleic acid, e.g., an siRNA or shRNA as described above, the RNAi agent can encode an interfering ribonucleic acid, e.g., an shRNA, as described above. In other words, the RNAi agent can be a transcriptional template of the interfering ribonucleic acid. Thus, RNAi agents of the present invention can also include small hairpin RNAs (shRNAs), and expression constructs engineered to express shRNAs. Transcription of shRNAs is initiated at a polymerase III (pol III) promoter, and is thought to be terminated at position 2 of a 4-5-thymine transcription termination site. Upon expression, shRNAs are thought to fold into a stem-loop structure with 3′ UU-overhangs; subsequently, the ends of these shRNAs are processed, converting the shRNAs into siRNA-like molecules of about 21-23 nucleotides (Brummelkamp et al., 2002; Lec et al., 2002, Supra; Miyagishi et al., 2002; Paddison et al., 2002, supra; Paul et al., 2002, supra; Sui et al., 2002 supra; Yu et al., 2002, supra. More information about shRNA design and use can be on found the internet at the following addresses: katandin.cshl.org:9331/RNAi/docs/BscRI-BamHI_Strategy.pdf and katandin.cshl.org:9331/RNAi/docs/Web_version_of_PCR_strategyl.pdf).

[0322] Expression constructs of the present invention include any construct suitable for use in the appropriate expression system and include, but are not limited to, retroviral vectors, linear expression cassettes, plasmids and viral or virally-derived vectors, as known in the art. Such expression constructs can include one or more inducible promoters, RNA Pol III promoter systems, such as U6 snRNA promoters or H1 RNA polymerase III promoters, or other promoters known in the art. The constructs can include one or both strands of the siRNA. Expression constructs expressing both strands can also include loop structures linking both strands, or each strand can be separately transcribed from separate promoters within the same construct. Each strand can also be transcribed from a separate expression construct. (Tuschl, T., 2002, Supra).

[0323] Synthetic siRNAs can be delivered into cells by methods known in the art, including cationic liposome transfection and electroporation. To obtain longer term suppression of the target genes (e.g., HTT-1A genes) and to facilitate delivery under certain circumstances, one or more siRNA can be expressed within cells from recombinant DNA constructs. Such methods for expressing siRNA duplexes within cells from recombinant DNA constructs to allow longer-term target gene suppression in cells are known in the art, including mammalian Pol III promoter systems (e.g., H1 or U6/snRNA promoter systems (Tuschl, T., 2002, supra) capable of expressing functional double-stranded siRNAs; (Bagella et al., 1998; Lec et al., 2002, supra; Miyagishi et al., 2002, supra; Paul et al., 2002, supra; Yu et al., 2002, supra; Sui et al., 2002, supra). Transcriptional termination by RNA Pol III occurs at runs of four consecutive T residues in the DNA template, providing a mechanism to end the siRNA transcript at a specific sequence. The siRNA is complementary to the sequence of the target gene in 5′-3′ and 3′-5′ orientations, and the two strands of the siRNA can be expressed in the same construct or in separate constructs. Hairpin siRNAs, driven by H1 or U6 snRNA promoter and expressed in cells, can inhibit target gene expression (Bagella et al., 1998; Lee et al., 2002, supra; Miyagishi et al., 2002, supra; Paul et al., 2002, supra; Yu et al., 2002), supra; Sui et al., 2002, supra). Constructs containing siRNA sequence under the control of T7 promoter also make functional siRNAs when co-transfected into the cells with a vector expressing T7 RNA polymerase (Jacque et al., 2002, supra). A single construct may contain multiple sequences coding for siRNAs, such as multiple regions of the gene encoding HTT-1A, targeting the same gene or multiple genes, and can be driven, for example, by separate PolIII promoter sites.

[0324] Animal cells express a range of noncoding RNAs of approximately 22 nucleotides termed micro RNA (miRNAs), which can regulate gene expression at the post transcriptional or translational level during animal development. One common feature of miRNAs is that they are all excised from an approximately 70 nucleotide precursor RNA stem-loop, probably by Dicer, an RNase III-type enzyme, or a homolog thereof. By substituting the stem sequences of the miRNA precursor with sequence complementary to the target mRNA, a vector construct that expresses the engineered precursor can be used to produce siRNAs to initiate RNAi against specific mRNA targets in mammalian cells (Zeng et al., 2002, supra). When expressed by DNA vectors containing polymerase III promoters, micro-RNA designed hairpins can silence gene expression (McManus et al., 2002, supra). MicroRNAs targeting polymorphisms may also be useful for blocking translation of mutant proteins, in the absence of siRNA-mediated gene-silencing. Such applications may be useful in situations, for example, where a designed siRNA caused off-target silencing of wild type protein.

[0325] Viral-mediated delivery mechanisms can also be used to induce specific silencing of targeted genes through expression of siRNA, for example, by generating recombinant adenoviruses harboring siRNA under RNA Pol II promoter transcription control (Xia et al., 2002, supra). Infection of HeLa cells by these recombinant adenoviruses allows for diminished endogenous target gene expression. Injection of the recombinant adenovirus vectors into transgenic mice expressing the target genes of the siRNA results in in vivo reduction of target gene expression. Id. In an animal model, whole-embryo electroporation can efficiently deliver synthetic siRNA into post-implantation mouse embryos (Calegari et al., 2002). In adult mice, efficient delivery of siRNA can be accomplished by “high-pressure” delivery technique, a rapid injection (within 5 seconds) of a large volume of siRNA containing solution into animal via the tail vein (Liu et al., 1999, supra; McCaffrey et al., 2002, supra; Lewis et al., 2002. Nanoparticles and liposomes can also be used to deliver siRNA into animals. In certain exemplary embodiments, recombinant adeno-associated viruses (rAAVs) and their associated vectors can be used to deliver one or more siRNAs into cells, e.g., neural cells (e.g., brain cells) (US Patent Applications 2014/0296486, 2010/0186103, 2008/0269149, 2006/0078542 and 2005/0220766).

[0326] The nucleic acid compositions of the invention include both unmodified siRNAs and modified siRNAs, such as crosslinked siRNA derivatives or derivatives having non-nucleotide moieties linked, for example to their 3′ or 5′ ends. Modifying siRNA derivatives in this way may improve cellular uptake or enhance cellular targeting activities of the resulting siRNA derivative, as compared to the corresponding siRNA, and are useful for tracing the siRNA derivative in the cell, or improving the stability of the siRNA derivative compared to the corresponding siRNA.

[0327] Engineered RNA precursors, introduced into cells or whole organisms as described herein, will lead to the production of a desired siRNA molecule. Such an siRNA molecule will then associate with endogenous protein components of the RNAi pathway to bind to and target a specific mRNA sequence for cleavage and destruction. In this fashion, the mRNA, which will be targeted by the siRNA generated from the engineered RNA precursor, and will be depleted from the cell or organism, leading to a decrease in the concentration of the protein encoded by that mRNA in the cell or organism. The RNA precursors are typically nucleic acid molecules that individually encode either one strand of a dsRNA or encode the entire nucleotide sequence of an RNA hairpin loop structure.

[0328] The nucleic acid compositions of the invention can be unconjugated or can be conjugated to another moiety, such as a nanoparticle, to enhance a property of the compositions, e.g., a pharmacokinetic parameter such as absorption, efficacy, bioavailability and/or half-life. The conjugation can be accomplished by methods known in the art, e.g., using the methods of Lambert et al., Drug Deliv. Rev.: 47(1), 99-112 (2001) (describes nucleic acids loaded to polyalkylcyanoacrylate (PACA) nanoparticles); Fattal et al., J. Control Release 53(1-3): 137-43 (1998) (describes nucleic acids bound to nanoparticles); Schwab et al., Ann. Oncol. 5 Suppl. 4:55-8 (1994) (describes nucleic acids linked to intercalating agents, hydrophobic groups, polycations or PACA nanoparticles); and Godard et al., Eur. J. Biochem. 232(2):404-10 (1995) (describes nucleic acids linked to nanoparticles).

[0329] The nucleic acid molecules of the present invention can also be labeled using any method known in the art. For instance, the nucleic acid compositions can be labeled with a fluorophore, e.g., Cy3, fluorescein, or rhodamine. The labeling can be carried out using a kit, e.g., the SILENCER™ siRNA labeling kit (Ambion). Additionally, the siRNA can be radiolabeled, e.g., using ³H, ³²P or another appropriate isotope.

[0330] Moreover, because RNAi is believed to progress via at least one single-stranded RNA intermediate, the skilled artisan will appreciate that ss-siRNAs (e.g., the antisense strand of a ds-siRNA) can also be designed (e.g., for chemical synthesis), generated (e.g., enzymatically generated), or expressed (e.g., from a vector or plasmid) as described herein and utilized according to the claimed methodologies. Moreover, in invertebrates, RNAi can be triggered effectively by long dsRNAs (e.g., dsRNAs about 100-1000 nucleotides in length, such as about 200-500, for example, about 250, 300, 350, 400 or 450 nucleotides in length) acting as effectors of RNAi. (Brondani et al., Proc Natl Acad Sci USA. 2001 Dec. 4; 98(25): 14428-33. Epub 2001 Nov. 27.)

### IV. Anti-HTT-1A RNA Silencing Agents

[0331] In certain embodiment, the present invention provides novel anti-HTT-1A RNA silencing agents (e.g., siRNA, shRNA, and antisense oligonucleotides), methods of making said RNA silencing agents, and methods (e.g., research and/or therapeutic methods) for using said improved RNA silencing agents (or portions thereof) for RNA silencing of HTT-1A protein. The RNA silencing agents comprise an antisense strand (or portions thereof), wherein the antisense strand has sufficient complementary to a target HTT-1A mRNA to mediate an RNA-mediated silencing mechanism (e.g. RNAi).

[0332] In certain embodiments, siRNA compounds are provided having one or any combination of the following properties: (1) fully chemically-stabilized (i.e., no unmodified 2′-OH residues); (2) asymmetry; (3) 11-20 base pair duplexes; (4) greater than 50% 2′-methoxy modifications, such as 70%-100% 2′-methoxy modifications, although an alternating pattern of chemically-modified nucleotides (e.g., 2′-fluoro and 2′-methoxy modifications), are also contemplated; and (5) single-stranded, fully phosphorothioated tails of 5-8 bases. In certain embodiments, the number of phosphorothioate modifications is varied from 4 to 16 total. In certain embodiments, the number of phosphorothioate modifications is varied from 8 to 13 total.

[0333] In certain embodiments, the siRNA compounds described herein can be conjugated to a variety of targeting agents, including, but not limited to, cholesterol, docosahexaenoic acid (DHA), phenyltropanes, cortisol, vitamin A, vitamin D, N-acetylgalactosamine (GalNac), and gangliosides. The cholesterol-modified version showed 5-10-fold improvement in efficacy in vitro versus previously used chemical stabilization patterns (e.g., wherein all purine but not pyrimidines are modified) in wide range of cell types (e.g., HeLa, neurons, hepatocytes, trophoblasts).

[0334] Certain compounds of the invention having the structural properties described above and herein may be referred to as “hsiRNA-ASP” (hydrophobically-modified, small interfering RNA, featuring an advanced stabilization pattern). In addition, this hsiRNA-ASP pattern showed a dramatically improved distribution through the brain, spinal cord, delivery to liver, placenta, kidney, spleen and several other tissues, making them accessible for therapeutic intervention.

[0335] The compounds of the invention can be described in the following aspects and embodiments.

[0336] In a first aspect, provided herein is a double stranded RNA (dsRNA) comprising an antisense strand and a sense strand, each strand comprising at least 14 contiguous nucleotides, with a 5′ end and a 3′ end, wherein:
[0337] (1) the antisense strand comprises a sequence substantially complementary to a HTT-1A nucleic acid sequence of any one of the sequences recited in Table 18;
[0338] (2) the antisense strand comprises alternating 2′-methoxy-ribonucleotides and 2′-fluoro-ribonucleotides;
[0339] (3) the nucleotides at positions 2 and 14 from the 5′ end of the antisense strand are not 2′-methoxy-ribonucleotides;
[0340] (4) the nucleotides at positions 1-2 to 1-7 from the 3′ end of the antisense strand are connected to each other via phosphorothioate internucleotide linkages;
[0341] (5) a portion of the antisense strand is complementary to a portion of the sense strand;
[0342] (6) the sense strand comprises alternating 2′-methoxy-ribonucleotides and 2′-fluoro-ribonucleotides; and
[0343] (7) the nucleotides at positions 1-2 from the 5′ end of the sense strand are connected to each other via phosphorothioate internucleotide linkages.

[0344] In a second aspect, provided herein is a dsRNA comprising an antisense strand and a sense strand, each strand comprising at least 14 contiguous nucleotides, with a 5′ end and a 3′ end, wherein:
[0345] (1) the antisense strand comprises a sequence substantially complementary to a HTT-1A nucleic acid sequence of any one of the sequences recited in Table 18;
[0346] (2) the antisense strand comprises at least 70% 2′-O-methyl modifications;
[0347] (3) the nucleotide at position 14 from the 5′ end of the antisense strand are not 2′-methoxy-ribonucleotides;
[0348] (4) the nucleotides at positions 1-2 to 1-7 from the 3′ end of the antisense strand are connected to each other via phosphorothioate internucleotide linkages;
[0349] (5) a portion of the antisense strand is complementary to a portion of the sense strand;
[0350] (6) the sense strand comprises at least 70% 2′-O-methyl modifications; and
[0351] (7) the nucleotides at positions 1-2 from the 5′ end of the sense strand are connected to each other via phosphorothioate internucleotide linkages.

[0352] In a third aspect, provided herein is a dsRNA comprising an antisense strand and a sense strand, each strand comprising at least 14 contiguous nucleotides, with a 5′ end and a 3′ end, wherein:
[0353] (1) the antisense strand comprises a sequence substantially complementary to a HTT-1A nucleic acid sequence of any one of the sequences recited in Table 18;
[0354] (2) the antisense strand comprises at least 85% 2′-O-methyl modifications;
[0355] (3) the nucleotides at positions 2 and 14 from the 5′ end of the antisense strand are not 2′-methoxy-ribonucleotides;
[0356] (4) the nucleotides at positions 1-2 to 1-7 from the 3′ end of the antisense strand are connected to each other via phosphorothioate internucleotide linkages;
[0357] (5) a portion of the antisense strand is complementary to a portion of the sense strand;
[0358] (6) the sense strand comprises 100% 2′-O-methyl modifications; and
[0359] (7) the nucleotides at positions 1-2 from the 5′ end of the sense strand are connected to each other via phosphorothioate internucleotide linkages.

[0360] In a fourth aspect, provided herein is a dsRNA comprising an antisense strand and a sense strand, each strand comprising at least 14 contiguous nucleotides, with a 5′ end and a 3′ end, wherein:
[0361] (1) the antisense strand comprises a sequence substantially complementary to a HTT-1A nucleic acid sequence of any one of the sequences recited in Table 18;
[0362] (2) the antisense strand comprises at least 75% 2′-O-methyl modifications;
[0363] (3) the nucleotides at positions 4, 5, 6, and 14 from the 5′ end of the antisense strand are not 2′-methoxy-ribonucleotides;
[0364] (4) the nucleotides at positions 1-2 to 1-7 from the 3′ end of the antisense strand are connected to each other via phosphorothioate internucleotide linkages;
[0365] (5) a portion of the antisense strand is complementary to a portion of the sense strand;
[0366] (6) the sense strand comprises 100% 2′-O-methyl modifications; and
[0367] (7) the nucleotides at positions 1-2 from the 5′ end of the sense strand are connected to each other via phosphorothioate internucleotide linkages.

[0368] In a fifth aspect, provided herein is a dsRNA comprising an antisense strand and a sense strand, each strand comprising at least 14 contiguous nucleotides, with a 5′ end and a 3′ end, wherein:
[0369] (1) the antisense strand comprises a sequence substantially complementary to a HTT-1A nucleic acid sequence of any one of the sequences recited in Table 18;
[0370] (2) the antisense strand comprises at least 75% 2′-O-methyl modifications;
[0371] (3) the nucleotides at positions 2, 4, 5, 6, and 14 from the 5′ end of the antisense strand are not 2′-methoxy-ribonucleotides;
[0372] (4) the nucleotides at positions 1-2 to 1-7 from the 3′ end of the antisense strand are connected to each other via phosphorothioate internucleotide linkages;
[0373] (5) a portion of the antisense strand is complementary to a portion of the sense strand;
[0374] (6) the sense strand comprises 100% 2′-O-methyl modifications; and
[0375] (7) the nucleotides at positions 1-2 from the 5′ end of the sense strand are connected to each other via phosphorothioate internucleotide linkages.

[0376] In a sixth aspect, provided herein is a dsRNA comprising an antisense strand and a sense strand, each strand comprising at least 14 contiguous nucleotides, with a 5′ end and a 3′ end, wherein:
[0377] (1) the antisense strand comprises a sequence substantially complementary to a HTT-1A nucleic acid sequence of any one of the sequences recited in Table 18;
[0378] (2) the antisense strand comprises at least 75% 2′-O-methyl modifications;
[0379] (3) the nucleotides at positions 2, 6, 14, and 16 from the 5′ end of the antisense strand are not 2′-methoxy-ribonucleotides;
[0380] (4) the nucleotides at positions 1-2 to 1-7 from the 3′ end of the antisense strand are connected to each other via phosphorothioate internucleotide linkages;
[0381] (5) a portion of the antisense strand is complementary to a portion of the sense strand;
[0382] (6) the sense strand comprises at least 70% 2′-O-methyl modifications;
[0383] (7) the nucleotides at positions 7, 9, 10, and 11 from the 3′ end of the sense strand are not 2′-methoxy-ribonucleotides; and
[0384] (8) the nucleotides at positions 1-2 from the 5′ end of the sense strand are connected to each other via phosphorothioate internucleotide linkages.

[0385] In a seventh aspect, provided herein is a dsRNA comprising an antisense strand and a sense strand, each strand comprising at least 14 contiguous nucleotides, with a 5′ end and a 3′ end, wherein:
[0386] (1) the antisense strand comprises a sequence substantially complementary to a HTT-1A nucleic acid sequence of any one of the sequences recited in Table 18;
[0387] (2) the antisense strand comprises at least 75% 2′-O-methyl modifications;
[0388] (3) the nucleotides at positions 2, 6, and 14 from the 5′ end of the antisense strand are not 2′-methoxy-ribonucleotides;
[0389] (4) the nucleotides at positions 1-2 to 1-7 from the 3′ end of the antisense strand are connected to each other via phosphorothioate internucleotide linkages;
[0390] (5) a portion of the antisense strand is complementary to a portion of the sense strand;
[0391] (6) the sense strand comprises at least 80% 2′-O-methyl modifications;
[0392] (7) the nucleotides at positions 7, 10, and 11 from the 3′ end of the sense strand are not 2′-methoxy-ribonucleotides; and
[0393] (8) the nucleotides at positions 1-2 from the 5′ end of the sense strand are connected to each other via phosphorothioate internucleotide linkages.
   a) Design of Anti-HTT-1A siRNA Molecules

[0394] An siRNA molecule of the application is a duplex made of a sense strand and complementary antisense strand, the antisense strand having sufficient complementary to a HTT-1A mRNA to mediate RNAi. In certain embodiments, the siRNA molecule has a length from about 10-50 or more nucleotides, i.e., each strand comprises 10-50 nucleotides (or nucleotide analogs). In other embodiments, the siRNA molecule has a length from about 15-30, e.g., 15, 16, 17, 18, 19, 20, 21, 22, 23, 24, 25, 26, 27, 28, 29, or 30 nucleotides in each strand, wherein one of the strands is sufficiently complementary to a target region. In certain embodiments, the strands are aligned such that there are at least 1, 2, 3, 4, 5, 6, 7, 8, 9, or 10 bases at the end of the strands, which do not align (i.e., for which no complementary bases occur in the opposing strand), such that an overhang of 1, 2, 3, 4, 5, 6, 7, 8, 9, or 10 residues occurs at one or both ends of the duplex when strands are annealed.

[0395] Usually, siRNAs can be designed by using any method known in the art, for instance, by using the following protocol:
[0396] 1. The siRNA should be specific for a target sequence, e.g., a target sequence set forth in the Examples. The first strand should be complementary to the target sequence, and the other strand is substantially complementary to the first strand. (See Examples for exemplary sense and antisense strands.) Exemplary target sequences are selected from any region of the target gene that leads to potent gene silencing. Regions of the target gene include, but are not limited to, the 5′ untranslated region (5′-UTR) of a target gene, the 3′ untranslated region (3′-UTR) of a target gene, an exon of a target gene, or an intron of a target gene. Cleavage of mRNA at these sites should eliminate translation of corresponding HTT-1A protein. Target sequences from other regions of the HTT-1A gene are also suitable for targeting. A sense strand is designed based on the target sequence.
[0397] 2. The sense strand of the siRNA is designed based on the sequence of the selected target site. In certain embodiments, the sense strand includes about 15 to 25 nucleotides, e.g., 15, 16, 17, 18, 19, 20, 21, 22, 23, 24 or 25 nucleotides. In certain embodiments, the sense strand includes 15, 16, 17, 18, 19, or 20 nucleotides. In certain embodiments, the sense strand is 15 nucleotides in length. In certain embodiments, the sense strand is 18 nucleotides in length. In certain embodiments, the sense strand is 20 nucleotides in length. The skilled artisan will appreciate, however, that siRNAs having a length of less than 15 nucleotides or greater than 25 nucleotides can also function to mediate RNAi. Accordingly, siRNAs of such length are also within the scope of the instant invention, provided that they retain the ability to mediate RNAi. Longer RNA silencing agents have been demonstrated to elicit an interferon or Protein Kinase R (PKR) response in certain mammalian cells which may be undesirable. In certain embodiments, the RNA silencing agents of the invention do not elicit a PKR response (i.e., are of a sufficiently short length). However, longer RNA silencing agents may be useful, for example, in cell types incapable of generating a PKR response or in situations where the PKR response has been down-regulated or dampened by alternative means.

[0398] The siRNA molecules of the invention have sufficient complementarity with the target sequence such that the siRNA can mediate RNAi. In general, siRNA containing nucleotide sequences sufficiently complementary to a target sequence portion of the target gene to effect RISC-mediated cleavage of the target gene are contemplated. Accordingly, in a certain embodiment, the antisense strand of the siRNA is designed to have a sequence sufficiently complementary to a portion of the target. For example, the antisense strand may have 100% complementarity to the target site. However, 100% complementarity is not required. Greater than 80% identity, e.g., 80%, 81%, 82%, 83%, 84%, 85%, 86%, 87%, 88%, 89%, 90%, 91%, 92%, 93%, 94%, 95%, 96%, 97%, 98%, 99% or even 100% complementarity, between the antisense strand and the target RNA sequence is contemplated. The present application has the advantage of being able to tolerate certain sequence variations to enhance efficiency and specificity of RNAi. In one embodiment, the antisense strand has 4, 3, 2, 1, or 0 mismatched nucleotide(s) with a target region, such as a target region that differs by at least one base pair between a wild-type and mutant allele, e.g., a target region comprising the gain-of-function mutation, and the other strand is identical or substantially identical to the first strand. Moreover, siRNA sequences with small insertions or deletions of 1 or 2 nucleotides may also be effective for mediating RNAi. Alternatively, siRNA sequences with nucleotide analog substitutions or insertions can be effective for inhibition.

[0399] Sequence identity may be determined by sequence comparison and alignment algorithms known in the art. To determine the percent identity of two nucleic acid sequences (or of two amino acid sequences), the sequences are aligned for optimal comparison purposes (e.g., gaps can be introduced in the first sequence or second sequence for optimal alignment). The nucleotides (or amino acid residues) at corresponding nucleotide (or amino acid) positions are then compared. When a position in the first sequence is occupied by the same residue as the corresponding position in the second sequence, then the molecules are identical at that position. The percent identity between the two sequences is a function of the number of identical positions shared by the sequences (i.e., % homology=number of identical positions/total number of positions×100), optionally penalizing the score for the number of gaps introduced and/or length of gaps introduced.

[0400] The comparison of sequences and determination of percent identity between two sequences can be accomplished using a mathematical algorithm. In one embodiment, the alignment generated over a certain portion of the sequence aligned having sufficient identity but not over portions having low degree of identity (i.e., a local alignment). A non-limiting example of a local alignment algorithm utilized for the comparison of sequences is the algorithm of Karlin and Altschul (1990) Proc. Natl. Acad. Sci. USA 87:2264-68, modified as in Karlin and Altschul (1993) Proc. Natl. Acad. Sci. USA 90:5873-77. Such an algorithm is incorporated into the BLAST programs (version 2.0) of Altschul, et al. (1990) J. Mol. Biol. 215:403-10.

[0401] In another embodiment, the alignment is optimized by introducing appropriate gaps and the percent identity is determined over the length of the aligned sequences (i.e., a gapped alignment). To obtain gapped alignments for comparison purposes, Gapped BLAST can be utilized as described in Altschul et al., (1997) Nucleic Acids Res. 25(17):3389-3402. In another embodiment, the alignment is optimized by introducing appropriate gaps and percent identity is determined over the entire length of the sequences aligned (i.e., a global alignment). A non-limiting example of a mathematical algorithm utilized for the global comparison of sequences is the algorithm of Myers and Miller, CABIOS (1989). Such an algorithm is incorporated into the ALIGN program (version 2.0) which is part of the GCG sequence alignment software package. When utilizing the ALIGN program for comparing amino acid sequences, a PAM120 weight residue table, a gap length penalty of 12, and a gap penalty of 4 can be used.
[0402] 3. The antisense or guide strand of the siRNA is routinely the same length as the sense strand and includes complementary nucleotides. In one embodiment, the guide and sense strands are fully complementary, i.e., the strands are blunt-ended when aligned or annealed. In another embodiment, the strands of the siRNA can be paired in such a way as to have a 3′ overhang of 1 to 7 (e.g., 2, 3, 4, 5, 6 or 7), or 1 to 4, e.g., 2, 3 or 4 nucleotides. Overhangs can comprise (or consist of) nucleotides corresponding to the target gene sequence (or complement thereof). Alternatively, overhangs can comprise (or consist of) deoxyribonucleotides, for example dTs, or nucleotide analogs, or other suitable non-nucleotide material. Thus, in another embodiment, the nucleic acid molecules may have a 3′ overhang of 2 nucleotides, such as TT. The overhanging nucleotides may be either RNA or DNA. As noted above, it is desirable to choose a target region wherein the mutant:wild type mismatch is a purine:purine mismatch.
[0403] 4. Using any method known in the art, compare the potential targets to the appropriate genome database (human, mouse, rat, etc.) and eliminate from consideration any target sequences with significant homology to other coding sequences. One such method for such sequence homology searches is known as BLAST, which is available at National Center for Biotechnology Information website.
[0404] 5. Select one or more sequences that meet your criteria for evaluation.

[0405] Further general information about the design and use of siRNA may be found in “The siRNA User Guide,” available at The Max-Plank-Institut fur Biophysikalische Chemie website.

[0406] Alternatively, the siRNA may be defined functionally as a nucleotide sequence (or oligonucleotide sequence) that is capable of hybridizing with the target sequence (e.g., 400 mM NaCl, 40 mM PIPES pH 6.4, 1 mM EDTA, 50° C. or 70° C. hybridization for 12-16 hours; followed by washing). Additional hybridization conditions include hybridization at 70° C. in 1×SSC or 50° C. in 1×SSC, 50% formamide followed by washing at 70° C. in 0.3×SSC or hybridization at 70° C. in 4×SSC or 50° C. in 4×SSC, 50% formamide followed by washing at 67° C. in 1×SSC. The hybridization temperature for hybrids anticipated to be less than 50 base pairs in length should be 5-10° C. less than the melting temperature (Tₘ) of the hybrid, where Tₘ is determined according to the following equations. For hybrids less than 18 base pairs in length, Tₘ(C)=2(# of A+T bases)+4(# of G+C bases). For hybrids between 18 and 49 base pairs in length, Tₘ(C)=81.5+16.6(log 10[Na+])+0.41(% G+C)−(600/N), where N is the number of bases in the hybrid, and [Na+] is the concentration of sodium ions in the hybridization buffer ([Na⁺] for 1×SSC=0.165 M). Additional examples of stringency conditions for polynucleotide hybridization are provided in Sambrook, J., E. F. Fritsch, and T. Maniatis, 1989, Molecular Cloning: A Laboratory Manual, Cold Spring Harbor Laboratory Press, Cold Spring Harbor, N.Y., chapters 9 and 11, and Current Protocols in Molecular Biology, 1995, F. M. Ausubel et al., eds., John Wiley & Sons, Inc., sections 2.10 and 6.3-6.4, incorporated herein by reference.

[0407] Negative control siRNAs should have the same nucleotide composition as the selected siRNA, but without significant sequence complementarity to the appropriate genome. Such negative controls may be designed by randomly scrambling the nucleotide sequence of the selected siRNA. A homology search can be performed to ensure that the negative control lacks homology to any other gene in the appropriate genome. In addition, negative control siRNAs can be designed by introducing one or more base mismatches into the sequence.
[0408] 6. To validate the effectiveness by which siRNAs destroy target mRNAs (e.g., wild-type or mutant HTT-1A mRNA), the siRNA may be incubated with target cDNA (e.g., HTT-1A cDNA) in a Drosophila-based in vitro mRNA expression system. Radiolabeled with ³²P, newly synthesized target mRNAs (e.g., HTT-1A mRNA) are detected autoradiographically on an agarose gel. The presence of cleaved target mRNA indicates mRNA nuclease activity. Suitable controls include omission of siRNA and use of non-target cDNA. Alternatively, control siRNAs are selected having the same nucleotide composition as the selected siRNA, but without significant sequence complementarity to the appropriate target gene. Such negative controls can be designed by randomly scrambling the nucleotide sequence of the selected siRNA. A homology search can be performed to ensure that the negative control lacks homology to any other gene in the appropriate genome. In addition, negative control siRNAs can be designed by introducing one or more base mismatches into the sequence.

[0409] Anti-HTT-1A siRNAs may be designed to target any of the target sequences described supra. Said siRNAs comprise an antisense strand, which is sufficiently complementary with the target sequence to mediate silencing of the target sequence. In certain embodiments, the RNA silencing agent is a siRNA.

[0410] In certain embodiments, the siRNA comprises a sense strand comprising a sequence set forth in Table 20 and an antisense strand comprising a sequence set forth in Table 20.

[0411] Sites of siRNA-mRNA complementation are selected, which result in optimal mRNA specificity and maximal mRNA cleavage.

b) siRNA-Like Molecules

[0412] siRNA-like molecules of the invention have a sequence (i.e., have a strand having a sequence) that is “sufficiently complementary” to a target sequence of an HTT-1A mRNA to direct gene silencing either by RNAi or translational repression. siRNA-like molecules are designed in the same way as siRNA molecules, but the degree of sequence identity between the sense strand and target RNA approximates that observed between a miRNA and its target. In general, as the degree of sequence identity between a miRNA sequence and the corresponding target gene sequence is decreased, the tendency to mediate post-transcriptional gene silencing by translational repression rather than RNAi is increased. Therefore, in an alternative embodiment, where post-transcriptional gene silencing by translational repression of the target gene is desired, the miRNA sequence has partial complementarity with the target gene sequence. In certain embodiments, the miRNA sequence has partial complementarity with one or more short sequences (complementarity sites) dispersed within the target mRNA (e.g. within the 3′-UTR of the target mRNA) (Hutvagner and Zamore, Science, 2002; Zeng et al., Mol. Cell, 2002; Zeng et al., RNA, 2003; Doench et al., Genes & Dev., 2003). Since the mechanism of translational repression is cooperative, multiple complementarity sites (e.g., 2, 3, 4, 5, or 6) may be targeted in certain embodiments.

[0413] The capacity of a siRNA-like duplex to mediate RNAi or translational repression may be predicted by the distribution of non-identical nucleotides between the target gene sequence and the nucleotide sequence of the silencing agent at the site of complementarity. In one embodiment, where gene silencing by translational repression is desired, at least one non-identical nucleotide is present in the central portion of the complementarity site so that duplex formed by the miRNA guide strand and the target mRNA contains a central “bulge” (Doench J G et al., Genes & Dev., 2003). In another embodiment 2, 3, 4, 5, or 6 contiguous or non-contiguous non-identical nucleotides are introduced. The non-identical nucleotide may be selected such that it forms a wobble base pair (e.g., G:U) or a mismatched base pair (G:A, C:A, C:U, G:G, A:A, C:C, U:U). In a further embodiment, the “bulge” is centered at nucleotide positions 12 and 13 from the 5′ end of the miRNA molecule.

c) Short Hairpin RNA (shRNA) Molecules

[0414] In certain featured embodiments, the instant invention provides shRNAs capable of mediating RNA silencing of an HTT-1A target sequence with enhanced selectivity. In contrast to siRNAs, shRNAs mimic the natural precursors of micro RNAs (miRNAs) and enter at the top of the gene silencing pathway. For this reason, shRNAs are believed to mediate gene silencing more efficiently by being fed through the entire natural gene silencing pathway.

[0415] miRNAs are noncoding RNAs of approximately 22 nucleotides, which can regulate gene expression at the post transcriptional or translational level during plant and animal development. One common feature of miRNAs is that they are all excised from an approximately 70 nucleotide precursor RNA stem-loop termed pre-miRNA, probably by Dicer, an RNase III-type enzyme, or a homolog thereof. Naturally-occurring miRNA precursors (pre-miRNA) have a single strand that forms a duplex stem including two portions that are generally complementary, and a loop, that connects the two portions of the stem. In typical pre-miRNAs, the stem includes one or more bulges, e.g., extra nucleotides that create a single nucleotide “loop” in one portion of the stem, and/or one or more unpaired nucleotides that create a gap in the hybridization of the two portions of the stem to each other. Short hairpin RNAs, or engineered RNA precursors, of the present application are artificial constructs based on these naturally occurring pre-miRNAs, but which are engineered to deliver desired RNA silencing agents (e.g., siRNAs of the invention). By substituting the stem sequences of the pre-miRNA with sequence complementary to the target mRNA, a shRNA is formed. The shRNA is processed by the entire gene silencing pathway of the cell, thereby efficiently mediating RNAi.

[0416] The requisite elements of a shRNA molecule include a first portion and a second portion, having sufficient complementarity to anneal or hybridize to form a duplex or double-stranded stem portion. The two portions need not be fully or perfectly complementary. The first and second “stem” portions are connected by a portion having a sequence that has insufficient sequence complementarity to anneal or hybridize to other portions of the shRNA. This latter portion is referred to as a “loop” portion in the shRNA molecule. The shRNA molecules are processed to generate siRNAs. shRNAs can also include one or more bulges, i.e., extra nucleotides that create a small nucleotide “loop” in a portion of the stem, for example a one-, two- or three-nucleotide loop. The stem portions can be the same length, or one portion can include an overhang of, for example, 1-5 nucleotides. The overhanging nucleotides can include, for example, uracils (Us), e.g., all Us. Such Us are notably encoded by thymidines (Ts) in the shRNA-encoding DNA which signal the termination of transcription.

[0417] In shRNAs (or engineered precursor RNAs) of the instant invention, one portion of the duplex stem is a nucleic acid sequence that is complementary (or anti-sense) to the HTT-1A target sequence. In certain embodiments, one strand of the stem portion of the shRNA is sufficiently complementary (e.g., antisense) to a target RNA (e.g., mRNA) sequence to mediate degradation or cleavage of said target RNA via RNA interference (RNAi). Thus, engineered RNA precursors include a duplex stem with two portions and a loop connecting the two stem portions. The antisense portion can be on the 5′ or 3′ end of the stem. The stem portions of a shRNA are about 15 to about 50 nucleotides in length. In certain embodiments, the two stem portions are about 18 or 19 to about 21, 22, 23, 24, 25, 30, 35, 37, 38, 39, or 40 or more nucleotides in length. In certain embodiments, the length of the stem portions should be 21 nucleotides or greater. When used in mammalian cells, the length of the stem portions should be less than about 30 nucleotides to avoid provoking non-specific responses like the interferon pathway. In non-mammalian cells, the stem can be longer than 30 nucleotides. In fact, the stem can include much larger sections complementary to the target mRNA (up to, and including the entire mRNA). In fact, a stem portion can include much larger sections complementary to the target mRNA (up to, and including the entire mRNA).

[0418] The two portions of the duplex stem must be sufficiently complementary to hybridize to form the duplex stem. Thus, the two portions can be, but need not be, fully or perfectly complementary. In addition, the two stem portions can be the same length, or one portion can include an overhang of 1, 2, 3, or 4 nucleotides. The overhanging nucleotides can include, for example, uracils (Us), e.g., all Us. The loop in the shRNAs or engineered RNA precursors may differ from natural pre-miRNA sequences by modifying the loop sequence to increase or decrease the number of paired nucleotides, or replacing all or part of the loop sequence with a tetraloop or other loop sequences. Thus, the loop in the shRNAs or engineered RNA precursors can be 2, 3, 4, 5, 6, 7, 8, 9, or more, e.g., 15 or 20, or more nucleotides in length.

[0419] The loop in the shRNAs or engineered RNA precursors may differ from natural pre-miRNA sequences by modifying the loop sequence to increase or decrease the number of paired nucleotides, or replacing all or part of the loop sequence with a tetraloop or other loop sequences. Thus, the loop portion in the shRNA can be about 2 to about 20 nucleotides in length, i.e., about 2, 3, 4, 5, 6, 7, 8, 9, or more, e.g., 15 or 20, or more nucleotides in length. In certain embodiments, a loop consists of or comprises a “tetraloop” sequence. Exemplary tetraloop sequences include, but are not limited to, the sequences GNRA, where N is any nucleotide and R is a purine nucleotide, GGGG, and UUUU.

[0420] In certain embodiments, shRNAs of the present application include the sequences of a desired siRNA molecule described supra. In other embodiments, the sequence of the antisense portion of a shRNA can be designed essentially as described above or generally by selecting an 18, 19, 20, 21 nucleotides, or longer, sequence from within the target RNA (e.g., HTT-1A mRNA), for example, from a region 100 to 200 or 300 nucleotides upstream or downstream of the start of translation. In general, the sequence can be selected from any portion of the target RNA (e.g., mRNA) including the 5′ UTR (untranslated region), coding sequence, or 3′ UTR. This sequence can optionally follow immediately after a region of the target gene containing two adjacent AA nucleotides. The last two nucleotides of the nucleotide sequence can be selected to be UU. This 21 or so nucleotide sequence is used to create one portion of a duplex stem in the shRNA. This sequence can replace a stem portion of a wild-type pre-miRNA sequence, e.g., enzymatically, or is included in a complete sequence that is synthesized. For example, one can synthesize DNA oligonucleotides that encode the entire stem-loop engineered RNA precursor, or that encode just the portion to be inserted into the duplex stem of the precursor, and using restriction enzymes to build the engineered RNA precursor construct, e.g., from a wild-type pre-miRNA.

[0421] Engineered RNA precursors include, in the duplex stem, the 21-22 or so nucleotide sequences of the siRNA or siRNA-like duplex desired to be produced in vivo. Thus, the stem portion of the engineered RNA precursor includes at least 18 or 19 nucleotide pairs corresponding to the sequence of an exonic portion of the gene whose expression is to be reduced or inhibited. The two 3′ nucleotides flanking this region of the stem are chosen so as to maximize the production of the siRNA from the engineered RNA precursor and to maximize the efficacy of the resulting siRNA in targeting the corresponding mRNA for translational repression or destruction by RNAi in vivo and in vitro.

[0422] In certain embodiments, shRNAs of the invention include miRNA sequences, optionally end-modified miRNA sequences, to enhance entry into RISC. The miRNA sequence can be similar or identical to that of any naturally occurring miRNA (see e.g. The miRNA Registry; Griffiths-Jones S, Nuc. Acids Res., 2004). Over one thousand natural miRNAs have been identified to date and together they are thought to comprise about 1% of all predicted genes in the genome. Many natural miRNAs are clustered together in the introns of pre-mRNAs and can be identified in silico using homology-based searches (Pasquinelli et al., 2000; Lagos-Quintana et al., 2001; Lau et al., 2001; Lee and Ambros, 2001) or computer algorithms (e.g. MiRScan, MiRSeeker) that predict the capability of a candidate miRNA gene to form the stem loop structure of a pri-mRNA (Grad et al., Mol. Cell., 2003; Lim et al., Genes Dev., 2003; Lim et al., Science, 2003; Lai E C et al., Genome Bio., 2003). An online registry provides a searchable database of all published miRNA sequences (The miRNA Registry at the Sanger Institute website; Griffiths-Jones S, Nuc. Acids Res., 2004). Exemplary, natural miRNAs include lin-4, let-7, miR-10, mirR-15, miR-16, miR-168, miR-175, miR-196 and their homologs, as well as other natural miRNAs from humans and certain model organisms including Drosophila melanogaster, Caenorhabditis elegans, zebrafish, Arabidopsis thalania, Mus musculus, and Rattus norvegicus as described in International PCT Publication No. WO 03/029459.

[0423] Naturally-occurring miRNAs are expressed by endogenous genes in vivo and are processed from a hairpin or stem-loop precursor (pre-miRNA or pri-miRNAs) by Dicer or other RNAses (Lagos-Quintana et al., Science, 2001; Lau et al., Science, 2001; Lee and Ambros, Science, 2001; Lagos-Quintana et al., Curr. Biol., 2002; Mourelatos et al., Genes Dev., 2002; Reinhart et al., Science, 2002; Ambros et al., Curr. Biol., 2003; Brennecke et al., 2003; Lagos-Quintana et al., RNA, 2003; Lim et al., Genes Dev., 2003; Lim et al., Science, 2003). miRNAs can exist transiently in vivo as a double-stranded duplex, but only one strand is taken up by the RISC complex to direct gene silencing. Certain miRNAs, e.g., plant miRNAs, have perfect or near-perfect complementarity to their target mRNAs and, hence, direct cleavage of the target mRNAs. Other miRNAs have less than perfect complementarity to their target mRNAs and, hence, direct translational repression of the target mRNAs. The degree of complementarity between a miRNA and its target mRNA is believed to determine its mechanism of action. For example, perfect or near-perfect complementarity between a miRNA and its target mRNA is predictive of a cleavage mechanism (Yekta et al., Science, 2004), whereas less than perfect complementarity is predictive of a translational repression mechanism. In certain embodiments, the miRNA sequence is that of a naturally-occurring miRNA sequence, the aberrant expression or activity of which is correlated with a miRNA disorder.

### d) Dual Functional Oligonucleotide Tethers

[0424] In other embodiments, the RNA silencing agents of the present invention include dual functional oligonucleotide tethers useful for the intercellular recruitment of a miRNA. Animal cells express a range of miRNAs, noncoding RNAs of approximately 22 nucleotides which can regulate gene expression at the post transcriptional or translational level. By binding a miRNA bound to RISC and recruiting it to a target mRNA, a dual functional oligonucleotide tether can repress the expression of genes involved e.g., in the arteriosclerotic process. The use of oligonucleotide tethers offers several advantages over existing techniques to repress the expression of a particular gene. First, the methods described herein allow an endogenous molecule (often present in abundance), a miRNA, to mediate RNA silencing. Accordingly, the methods described herein obviate the need to introduce foreign molecules (e.g., siRNAs) to mediate RNA silencing. Second, the RNA-silencing agents and the linking moiety (e.g., oligonucleotides such as the 2′-O-methyl oligonucleotide), can be made stable and resistant to nuclease activity. As a result, the tethers of the present invention can be designed for direct delivery, obviating the need for indirect delivery (e.g. viral) of a precursor molecule or plasmid designed to make the desired agent within the cell. Third, tethers and their respective moieties, can be designed to conform to specific mRNA sites and specific miRNAs. The designs can be cell and gene product specific. Fourth, the methods disclosed herein leave the mRNA intact, allowing one skilled in the art to block protein synthesis in short pulses using the cell's own machinery. As a result, these methods of RNA silencing are highly regulatable.

[0425] The dual functional oligonucleotide tethers (“tethers”) of the invention are designed such that they recruit miRNAs (e.g., endogenous cellular miRNAs) to a target mRNA so as to induce the modulation of a gene of interest. In certain embodiments, the tethers have the formula T-L-μ, wherein T is an mRNA targeting moiety, L is a linking moiety, and μ is a miRNA recruiting moiety. Any one or more moiety may be double stranded. In certain embodiments, each moiety is single stranded.

[0426] Moieties within the tethers can be arranged or linked (in the 5′ to 3′ direction) as depicted in the formula T-L-μ (i.e., the 3′ end of the targeting moiety linked to the 5′ end of the linking moiety and the 3′ end of the linking moiety linked to the 5′ end of the miRNA recruiting moiety). Alternatively, the moieties can be arranged or linked in the tether as follows: μ-T-L (i.e., the 3′ end of the miRNA recruiting moiety linked to the 5′ end of the linking moiety and the 3′ end of the linking moiety linked to the 5′ end of the targeting moiety).

[0427] The mRNA targeting moiety, as described above, is capable of capturing a specific target mRNA. According to the invention, expression of the target mRNA is undesirable, and, thus, translational repression of the mRNA is desired. The mRNA targeting moiety should be of sufficient size to effectively bind the target mRNA. The length of the targeting moiety will vary greatly, depending, in part, on the length of the target mRNA and the degree of complementarity between the target mRNA and the targeting moiety. In various embodiments, the targeting moiety is less than about 200, 100, 50, 30, 25, 20, 19, 18, 17, 16, 15, 14, 13, 12, 11, 10, 9, 8, 7, 6, or 5 nucleotides in length. In a certain embodiment, the targeting moiety is about 15 to about 25 nucleotides in length.

[0428] The miRNA recruiting moiety, as described above, is capable of associating with a miRNA. According to the present application, the miRNA may be any miRNA capable of repressing the target mRNA. Mammals are reported to have over 250 endogenous miRNAs (Lagos-Quintana et al. (2002) Current Biol. 12:735-739; Lagos-Quintana et al. (2001) Science 294:858-862; and Lim et al. (2003) Science 299:1540). In various embodiments, the miRNA may be any art-recognized miRNA.

[0429] The linking moiety is any agent capable of linking the targeting moieties such that the activity of the targeting moieties is maintained. Linking moieties can be oligonucleotide moieties comprising a sufficient number of nucleotides, such that the targeting agents can sufficiently interact with their respective targets. Linking moieties have little or no sequence homology with cellular mRNA or miRNA sequences. Exemplary linking moieties include one or more 2′-O-methylnucleotides, e.g., 2′-B-methyladenosine, 2′-O-methylthymidine, 2′-O-methylguanosine or 2′-O-methyluridine.

### e) Gene Silencing Oligonucleotides

[0430] In certain exemplary embodiments, gene expression (i.e., HTT-1A gene expression) can be modulated using oligonucleotide-based compounds comprising two or more single stranded antisense oligonucleotides that are linked through their 5′-ends that allow the presence of two or more accessible 3′-ends to effectively inhibit or decrease HTT-1A gene expression. Such linked oligonucleotides are also known as Gene Silencing Oligonucleotides (GSOs). (See, e.g., U.S. Pat. No. 8,431,544 assigned to Idera Pharmaceuticals, Inc., incorporated herein by reference in its entirety for all purposes.)

[0431] The linkage at the 5′ ends of the GSOs is independent of the other oligonucleotide linkages and may be directly via 5′, 3′ or 2′hydroxyl groups, or indirectly, via a non-nucleotide linker or a nucleoside, utilizing either the 2′ or 3′ hydroxyl positions of the nucleoside. Linkages may also utilize a functionalized sugar or nucleobase of a 5′ terminal nucleotide.

[0432] GSOs can comprise two identical or different sequences conjugated at their 5′-5′ ends via a phosphodiester, phosphorothioate or non-nucleoside linker. Such compounds may comprise 15 to 27 nucleotides that are complementary to specific portions of mRNA targets of interest for antisense down regulation of a gene product. GSOs that comprise identical sequences can bind to a specific mRNA via Watson-Crick hydrogen bonding interactions and inhibit protein expression. GSOs that comprise different sequences are able to bind to two or more different regions of one or more mRNA target and inhibit protein expression. Such compounds are comprised of heteronucleotide sequences complementary to target mRNA and form stable duplex structures through Watson-Crick hydrogen bonding. Under certain conditions, GSOs containing two free 3′-ends (5′-5′-attached antisense) can be more potent inhibitors of gene expression than those containing a single free 3′-end or no free 3′-end.

[0433] In some embodiments, the non-nucleotide linker is glycerol or a glycerol homolog of the formula HO—(CH₂)ₒ—CH(OH)—(CH₂)ₚ—OH, wherein o and p independently are integers from 1 to about 6, from 1 to about 4 or from 1 to about 3. In some other embodiments, the non-nucleotide linker is a derivative of 1,3-diamino-2-hydroxypropane. Some such derivatives have the formula HO—(CH₂)ₘ—C(O)NH—CH₂—CH(OH)—CH₂—NHC(O)—(CH₂)ₘ—OH, wherein m is an integer from 0 to about 10, from 0 to about 6, from 2 to about 6 or from 2 to about 4.

[0434] Some non-nucleotide linkers permit attachment of more than two GSO components. For example, the non-nucleotide linker glycerol has three hydroxyl groups to which GSO components may be covalently attached. Some oligonucleotide-based compounds of the invention, therefore, comprise two or more oligonucleotides linked to a nucleotide or a non-nucleotide linker. Such oligonucleotides according to the invention are referred to as being “branched.”

[0435] In certain embodiments, GSOs are at least 14 nucleotides in length. In certain exemplary embodiments, GSOs are 15 to 40 nucleotides long or 20 to 30 nucleotides in length. Thus, the component oligonucleotides of GSOs can independently be 14, 15, 16, 17, 18, 19, 20, 21, 22, 23, 24, 25, 26, 27, 28, 29, 30, 31, 32, 33, 34, 35, 36, 37, 38, 39 or 40 nucleotides in length.

[0436] These oligonucleotides can be prepared by the art recognized methods, such as phosphoramidate or H-phosphonate chemistry, which can be carried out manually or by an automated synthesizer. These oligonucleotides may also be modified in a number of ways without compromising their ability to hybridize to mRNA. Such modifications may include at least one internucleotide linkage of the oligonucleotide being an alkylphosphonate, phosphorothioate, phosphorodithioate, methylphosphonate, phosphate ester, alkylphosphonothioate, phosphoramidate, carbamate, carbonate, phosphate hydroxyl, acetamidate, carboxymethyl ester, or a combination of these and other internucleotide linkages between the 5′ end of one nucleotide and the 3′ end of another nucleotide, in which the 5′ nucleotide phosphodiester linkage has been replaced with any number of chemical groups. FIG. 12A depicts schematics of chemical modifications of oligonucleotide siRNAs.

### V. Modified Anti-HTT-1A RNA Silencing Agents

[0437] In certain aspects of the invention, an RNA silencing agent (or any portion thereof) of the present application, as described supra, may be modified, such that the activity of the agent is further improved. For example, the RNA silencing agents described in Section II supra, may be modified with any of the modifications described infra. The modifications can, in part, serve to further enhance target discrimination, to enhance stability of the agent (e.g., to prevent degradation), to promote cellular uptake, to enhance the target efficiency, to improve efficacy in binding (e.g., to the targets), to improve patient tolerance to the agent, and/or to reduce toxicity.

### 1) Modifications to Enhance Target Discrimination

[0438] In certain embodiments, the RNA silencing agents of the present application may be substituted with a destabilizing nucleotide to enhance single nucleotide target discrimination (see U.S. application Ser. No. 11/698,689, filed Jan. 25, 2007 and U.S. Provisional Application No. 60/762,225 filed Jan. 25, 2006, both of which are incorporated herein by reference). Such a modification may be sufficient to abolish the specificity of the RNA silencing agent for a non-target mRNA (e.g. wild-type mRNA), without appreciably affecting the specificity of the RNA silencing agent for a target mRNA (e.g. gain-of-function mutant mRNA).

[0439] In certain embodiments, the RNA silencing agents of the present application are modified by the introduction of at least one universal nucleotide in the antisense strand thereof. Universal nucleotides comprise base portions that are capable of base pairing indiscriminately with any of the four conventional nucleotide bases (e.g. A, G, C, U). A universal nucleotide is contemplated because it has relatively minor effect on the stability of the RNA duplex or the duplex formed by the guide strand of the RNA silencing agent and the target mRNA. Exemplary universal nucleotides include those having an inosine base portion or an inosine analog base portion selected from the group consisting of deoxyinosine (e.g. 2′-deoxyinosine), 7-deaza-2′-deoxyinosine, 2′-aza-2′-deoxyinosine, PNA-inosine, morpholino-inosine, LNA-inosine, phosphoramidate-inosine, 2′-O-methoxyethyl-inosine, and 2′-OMe-inosine. In certain embodiments, the universal nucleotide is an inosine residue or a naturally occurring analog thereof.

[0440] In certain embodiments, the RNA silencing agents of the invention are modified by the introduction of at least one destabilizing nucleotide within 5 nucleotides from a specificity-determining nucleotide (i.e., the nucleotide which recognizes the disease-related polymorphism). For example, the destabilizing nucleotide may be introduced at a position that is within 5, 4, 3, 2, or 1 nucleotide(s) from a specificity-determining nucleotide. In exemplary embodiments, the destabilizing nucleotide is introduced at a position which is 3 nucleotides from the specificity-determining nucleotide (i.e., such that there are 2 stabilizing nucleotides between the destablilizing nucleotide and the specificity-determining nucleotide). In RNA silencing agents having two strands or strand portions (e.g. siRNAs and shRNAs), the destabilizing nucleotide may be introduced in the strand or strand portion that does not contain the specificity-determining nucleotide. In certain embodiments, the destabilizing nucleotide is introduced in the same strand or strand portion that contains the specificity-determining nucleotide.

### 2) Modifications to Enhance Efficacy and Specificity

[0441] In certain embodiments, the RNA silencing agents of the invention may be altered to facilitate enhanced efficacy and specificity in mediating RNAi according to asymmetry design rules (see U.S. Pat. Nos. 8,309,704, 7,750,144, 8,304,530, 8,329,892 and 8,309,705). Such alterations facilitate entry of the antisense strand of the siRNA (e.g., a siRNA designed using the methods of the present application or an siRNA produced from a shRNA) into RISC in favor of the sense strand, such that the antisense strand preferentially guides cleavage or translational repression of a target mRNA, and thus increasing or improving the efficiency of target cleavage and silencing. In certain embodiments, the asymmetry of an RNA silencing agent is enhanced by lessening the base pair strength between the antisense strand 5′ end (AS 5′) and the sense strand 3′ end (S 3′) of the RNA silencing agent relative to the bond strength or base pair strength between the antisense strand 3′ end (AS 3′) and the sense strand 5′ end (S '5) of said RNA silencing agent.

[0442] In one embodiment, the asymmetry of an RNA silencing agent of the present application may be enhanced such that there are fewer G:C base pairs between the 5′ end of the first or antisense strand and the 3′ end of the sense strand portion than between the 3′ end of the first or antisense strand and the 5′ end of the sense strand portion. In another embodiment, the asymmetry of an RNA silencing agent of the invention may be enhanced such that there is at least one mismatched base pair between the 5′ end of the first or antisense strand and the 3′ end of the sense strand portion. In certain embodiments, the mismatched base pair is selected from the group consisting of G:A, C:A, C:U, G:G, A:A, C:C and U:U. In another embodiment, the asymmetry of an RNA silencing agent of the invention may be enhanced such that there is at least one wobble base pair, e.g., G:U, between the 5′ end of the first or antisense strand and the 3′ end of the sense strand portion. In another embodiment, the asymmetry of an RNA silencing agent of the invention may be enhanced such that there is at least one base pair comprising a rare nucleotide, e.g., inosine (I). In certain embodiments, the base pair is selected from the group consisting of an I:A, I:U and I:C. In yet another embodiment, the asymmetry of an RNA silencing agent of the invention may be enhanced such that there is at least one base pair comprising a modified nucleotide. In certain embodiments, the modified nucleotide is selected from the group consisting of 2-amino-G, 2-amino-A, 2,6-diamino-G, and 2,6-diamino-A.

3) RNA Silencing Agents with Enhanced Stability

[0443] The RNA silencing agents of the present application can be modified to improve stability in serum or in growth medium for cell cultures. In order to enhance the stability, the 3′-residues may be stabilized against degradation, e.g., they may be selected such that they consist of purine nucleotides, such as adenosine or guanosine nucleotides. Alternatively, substitution of pyrimidine nucleotides by modified analogues, e.g., substitution of uridine by 2′-deoxythymidine is tolerated and does not affect the efficiency of RNA interference.

[0444] In a one aspect, the present application features RNA silencing agents that include first and second strands wherein the second strand and/or first strand is modified by the substitution of internal nucleotides with modified nucleotides, such that in vivo stability is enhanced as compared to a corresponding unmodified RNA silencing agent. As defined herein, an “internal” nucleotide is one occurring at any position other than the 5′ end or 3′ end of nucleic acid molecule, polynucleotide or oligonucleotide. An internal nucleotide can be within a single-stranded molecule or within a strand of a duplex or double-stranded molecule. In one embodiment, the sense strand and/or antisense strand is modified by the substitution of at least one internal nucleotide. In another embodiment, the sense strand and/or antisense strand is modified by the substitution of at least 2, 3, 4, 5, 6, 7, 8, 9, 10, 11, 12, 13, 14, 15, 16, 17, 18, 19, 20, 21, 22, 23, 24, 25 or more internal nucleotides. In another embodiment, the sense strand and/or antisense strand is modified by the substitution of at least 5%, 10%, 15%, 20%, 25%, 30%, 35%, 40%, 45%, 50%, 55%, 60%, 65%, 70%, 75%, 80%, 85%, 90%, 95% or more of the internal nucleotides. In yet another embodiment, the sense strand and/or antisense strand is modified by the substitution of all of the internal nucleotides.

[0445] In one aspect, the present application features RNA silencing agents that are at least 80% chemically modified. In certain embodiments, the RNA silencing agents may be fully chemically modified, i.e., 100% of the nucleotides are chemically modified. In another aspect, the present application features RNA silencing agents comprising 2′-OH ribose groups that are at least 80% chemically modified. In certain embodiments, the RNA silencing agents comprise 2′-OH ribose groups that are about 80%, 85%, 90%, 95%, or 100% chemically modified.

[0446] In certain embodiments, the RNA silencing agents may contain at least one modified nucleotide analogue. The nucleotide analogues may be located at positions where the target-specific silencing activity, e.g., the RNAi mediating activity or translational repression activity is not substantially affected, e.g., in a region at the 5′-end and/or the 3′-end of the siRNA molecule. Moreover, the ends may be stabilized by incorporating modified nucleotide analogues.

[0447] Exemplary nucleotide analogues include sugar- and/or backbone-modified ribonucleotides (i.e., include modifications to the phosphate-sugar backbone). For example, the phosphodiester linkages of natural RNA may be modified to include at least one of a nitrogen or sulfur heteroatom. In exemplary backbone-modified ribonucleotides, the phosphoester group connecting to adjacent ribonucleotides is replaced by a modified group, e.g., of phosphothioate group. In exemplary sugar-modified ribonucleotides, the 2′ OH-group is replaced by a group selected from H, OR, R, halo, SH, SR, NH₂, NHR, NR₂ or ON, wherein R is C₁-C₆ alkyl, alkenyl or alkynyl and halo is F, Cl, Br or I.

[0448] In certain embodiments, the modifications are 2′-fluoro, 2′-amino and/or 2′-thio modifications. Modifications include 2′-fluoro-cytidine, 2′-fluoro-uridine, 2′-fluoro-adenosine, 2′-fluoro-guanosine, 2′-amino-cytidine, 2′-amino-uridine, 2′-amino-adenosine, 2′-amino-guanosine, 2,6-diaminopurine, 4-thio-uridine, and/or 5-amino-allyl-uridine. In a certain embodiment, the 2′-fluoro ribonucleotides are every uridine and cytidine. Additional exemplary modifications include 5-bromo-uridine, 5-iodo-uridine, 5-methyl-cytidine, ribo-thymidine, 2-aminopurine, 2′-amino-butyryl-pyrene-uridine, 5-fluoro-cytidine, and 5-fluoro-uridine. 2′-deoxy-nucleotides and 2′-Ome nucleotides can also be used within modified RNA-silencing agents moities of the instant invention. Additional modified residues include, deoxy-abasic, inosine, N3-methyl-uridine, N6,N6-dimethyl-adenosine, pseudouridine, purine ribonucleoside and ribavirin. In a certain embodiment, the 2′ moiety is a methyl group such that the linking moiety is a 2′-O-methyl oligonucleotide.

[0449] In a certain embodiment, the RNA silencing agent of the present application comprises Locked Nucleic Acids (LNAs). LNAs comprise sugar-modified nucleotides that resist nuclease activities (are highly stable) and possess single nucleotide discrimination for mRNA (Elmen et al., Nucleic Acids Res., (2005), 33(1): 439-447; Braasch et al. (2003) Biochemistry 42:7967-7975, Petersen et al. (2003) Trends Biotechnol 21:74-81). These molecules have 2′-O,4′-C-ethylene-bridged nucleic acids, with possible modifications such as 2′-deoxy-2″-fluorouridine. Moreover, LNAs increase the specificity of oligonucleotides by constraining the sugar moiety into the 3′-endo conformation, thereby pre-organizing the nucleotide for base pairing and increasing the melting temperature of the oligonucleotide by as much as 10° C. per base.

[0450] In another exemplary embodiment, the RNA silencing agent of the present application comprises Peptide Nucleic Acids (PNAs). PNAs comprise modified nucleotides in which the sugar-phosphate portion of the nucleotide is replaced with a neutral 2-amino ethylglycine moiety capable of forming a polyamide backbone, which is highly resistant to nuclease digestion and imparts improved binding specificity to the molecule (Nielsen, et al., Science, (2001), 254: 1497-1500).

[0451] Also contemplated are nucleobase-modified ribonucleotides, i.e., ribonucleotides, containing at least one non-naturally occurring nucleobase instead of a naturally occurring nucleobase. Bases may be modified to block the activity of adenosine deaminase. Exemplary modified nucleobases include, but are not limited to, uridine and/or cytidine modified at the 5-position, e.g., 5-(2-amino)propyl uridine, 5-bromo uridine; adenosine and/or guanosines modified at the 8 position, e.g., 8-bromo guanosine; deaza nucleotides, e.g., 7-deaza-adenosine; O- and N-alkylated nucleotides, e.g., N6-methyl adenosine are suitable. It should be noted that the above modifications may be combined.

[0452] In other embodiments, cross-linking can be employed to alter the pharmacokinetics of the RNA silencing agent, for example, to increase half-life in the body. Thus, the present application includes RNA silencing agents having two complementary strands of nucleic acid, wherein the two strands are crosslinked. The present application also includes RNA silencing agents which are conjugated or unconjugated (e.g., at its 3′ terminus) to another moiety (e.g. a non-nucleic acid moiety such as a peptide), an organic compound (e.g., a dyc), or the like). Modifying siRNA derivatives in this way may improve cellular uptake or enhance cellular targeting activities of the resulting siRNA derivative as compared to the corresponding siRNA, are useful for tracing the siRNA derivative in the cell, or improve the stability of the siRNA derivative compared to the corresponding siRNA.

[0453] Other exemplary modifications include: (a) 2′ modification, e.g., provision of a 2′ OMe moiety on a U in a sense or antisense strand, but especially on a sense strand, or provision of a 2′ OMe moiety in a 3′ overhang, e.g., at the 3′ terminus (3′ terminus means at the 3′ atom of the molecule or at the most 3′ moiety, e.g., the most 3′ P or 2′ position, as indicated by the context); (b) modification of the backbone, e.g., with the replacement of an 0 with an S, in the phosphate backbone, e.g., the provision of a phosphorothioate modification, on the U or the A or both, especially on an antisense strand; e.g., with the replacement of a O with an S; (c) replacement of the U with a C5 amino linker; (d) replacement of an A with a G (sequence changes can be located on the sense strand and not the antisense strand in certain embodiments); and (d) modification at the 2′, 6′, 7′, or 8′ position. Exemplary embodiments are those in which one or more of these modifications are present on the sense but not the antisense strand, or embodiments where the antisense strand has fewer of such modifications. Yet other exemplary modifications include the use of a methylated P in a 3′ overhang, e.g., at the 3′ terminus; combination of a 2′ modification, e.g., provision of a 2′ O Me moiety and modification of the backbone, e.g., with the replacement of a O with an S, e.g., the provision of a phosphorothioate modification, or the use of a methylated P, in a 3′ overhang, e.g., at the 3′ terminus; modification with a 3′ alkyl; modification with an abasic pyrrolidone in a 3′ overhang, e.g., at the 3′ terminus; modification with naproxen, ibuprofen, or other moieties which inhibit degradation at the 3′ terminus.

### Heavily Modified RNA Silencing Agents

[0454] In certain embodiments, the RNA silencing agent comprises at least 80% chemically modified nucleotides. In certain embodiments, the RNA silencing agent is fully chemically modified, i.e., 100% of the nucleotides are chemically modified.

[0455] In certain embodiments, the RNA silencing agent is 2′-O-methyl rich, i.e., comprises greater than 50% 2′-O-methyl content. In certain embodiments, the RNA silencing agent comprises at least about 55%, 60%, 65%, 70%, 75%, 80%, 85%, 90%, 95%, or 100% 2′-O-methyl nucleotide content. In certain embodiments, the RNA silencing agent comprises at least about 70% 2′-O-methyl nucleotide modifications. In certain embodiments, the RNA silencing agent comprises between about 70% and about 90% 2′-O-methyl nucleotide modifications. In certain embodiments, the RNA silencing agent is a dsRNA comprising an antisense strand and sense strand. In certain embodiments, the antisense strand comprises at least about 70% 2′-O-methyl nucleotide modifications. In certain embodiments, the antisense strand comprises between about 70% and about 90% 2′-O-methyl nucleotide modifications. In certain embodiments, the sense strand comprises at least about 70% 2′-O-methyl nucleotide modifications. In certain embodiments, the sense strand comprises between about 70% and about 90% 2′-O-methyl nucleotide modifications. In certain embodiments, the sense strand comprises between 100% 2′-O-methyl nucleotide modifications.

[0456] 2′-O-methyl rich RNA silencing agents and specific chemical modification patterns are further described in U.S. Ser. No. 16/550,076 (filed Aug. 23, 2019) and U.S. Ser. No. 62/891,185 (filed Aug. 23, 2019), each of which is incorporated herein by reference.

### Internucleotide Linkage Modifications

[0457] In certain embodiments, at least one internucleotide linkage, intersubunit linkage, or nucleotide backbone is modified in the RNA silencing agent. In certain embodiments, all of the internucleotide linkages in the RNA silencing agent are modified. In certain embodiments, the modified internucleotide linkage comprises a phosphorothioate internucleotide linkage. In certain embodiments, the RNA silencing agent comprise 1, 2, 3, 4, 5, 6, 7, 8, 9, 10, 11, 12, 13, 14, 15, 16, 17, 18, 19, 20, 21, 22, 23, 24, or 25 phosphorothioate internucleotide linkages. In certain embodiments, the RNA silencing agent comprises 4-16 phosphorothioate internucleotide linkages. In certain embodiments, the RNA silencing agent comprises 8-13 phosphorothioate internucleotide linkages. In certain embodiments, the RNA silencing agent is a dsRNA comprising an antisense strand and a sense strand, each comprising a 5′ end and a 3′ end. In certain embodiments, the nucleotides at positions 1 and 2 from the 5′ end of sense strand are connected to adjacent ribonucleotides via phosphorothioate internucleotide linkages. In certain embodiments, the nucleotides at positions 1 and 2 from the 3′ end of sense strand are connected to adjacent ribonucleotides via phosphorothioate internucleotide linkages. In certain embodiments, the nucleotides at positions 1 and 2 from the 5′ end of antisense strand are connected to adjacent ribonucleotides via phosphorothioate internucleotide linkages. In certain embodiments, the nucleotides at positions 1-2 to 1-8 from the 3′ end of antisense strand are connected to adjacent ribonucleotides via phosphorothioate internucleotide linkages. In certain embodiments, the nucleotides at positions 1-2, 1-3, 1-4, 1-5, 1-6, 1-7, or 1-8 from the 3′ end of antisense strand are connected to adjacent ribonucleotides via phosphorothioate internucleotide linkages. In certain embodiments, the nucleotides at positions 1-2 to 1-7 from the 3′ end of antisense strand are connected to adjacent ribonucleotides via phosphorothioate internucleotide linkages.

[0458] In one aspect, the disclosure provides a modified oligonucleotide, said oligonucleotide having a 5′ end, a 3′ end, that is complementary to a target, wherein the oligonucleotide comprises a sense and antisense strand, and at least one modified intersubunit linkage of Formula (I):

[chemical structure]

wherein:
[0459] B is a base pairing moiety;
[0460] W is selected from the group consisting of O, OCH₂, OCH, CH₂, and CH;
[0461] X is selected from the group consisting of halo, hydroxy, and C₁₋₆ alkoxy;
[0462] Y is selected from the group consisting of O⁻, OH, OR, NH⁻, NH₂, S⁻, and SH;
[0463] Z is selected from the group consisting of O and CH₂;
[0464] R is a protecting group; and
[0465] [symbol] is an optional double bond.

[0466] In an embodiment of Formula (I), when W is CH, [symbol] is a double bond.

[0467] In an embodiment of Formula (I), when W selected from the group consisting of O, OCH₂, OCH, CH₂, [symbol] is a single bond.

[0468] In an embodiment of Formula (I), when Y is O⁻, either Z or W is not O.

[0469] In an embodiment of Formula (I), Z is CH₂ and W is CH₂. In another embodiment, the modified intersubunit linkage of Formula (I) is a modified intersubunit linkage of Formula (II):

[chemical structure]

[0470] In an embodiment of Formula (I), Z is CH₂ and W is O. In another embodiment, wherein the modified intersubunit linkage of Formula (I) is a modified intersubunit linkage of Formula (III):

[chemical structure]

[0471] In an embodiment of Formula (I), Z is O and W is CH₂. In another embodiment, the modified intersubunit linkage of Formula (I) is a modified intersubunit linkage of Formula (IV):

[chemical structure]

[0472] In an embodiment of Formula (I), Z is O and W is CH. In another embodiment, the modified intersubunit linkage of Formula (I) is a modified intersubunit linkage of Formula V:

[chemical structure]

[0473] In an embodiment of Formula (I), Z is O and W is OCH₂. In another embodiment, the modified intersubunit linkage of Formula (I) is a modified intersubunit linkage of Formula VI:

[chemical structure]

[0474] In an embodiment of Formula (I), Z is CH₂ and W is CH. In another embodiment, the modified intersubunit linkage of Formula (I) is a modified intersubunit linkage of Formula VII:

[chemical structure]

[0475] In an embodiment of Formula (I), the base pairing moiety B is selected from the group consisting of adenine, guanine, cytosine, and uracil.

[0476] In an embodiment, the modified oligonucleotide is incorporated into siRNA, said modified siRNA having a 5′ end, a 3′ end, that is complementary to a target, wherein the siRNA comprises a sense and antisense strand, and at least one modified intersubunit linkage of any one or more of Formula (I), Formula (II), Formula (III), Formula (IV), Formula (V), Formula (VI), or Formula (VII).

[0477] In an embodiment, the modified oligonucleotide is incorporated into siRNA, said modified siRNA having a 5′ end, a 3′ end, that is complementary to a target and comprises a sense and antisense strand, wherein the siRNA comprises at least one modified intersubunit linkage is of Formula VIII:

[chemical structure]

wherein:
[0478] D is selected from the group consisting of O, OCH₂, OCH, CH₂, and CH;
[0479] C is selected from the group consisting of O⁻, OH, OR¹, NH⁻, NH₂, S⁻, and SH;
[0480] A is selected from the group consisting of O and CH₂;
   R¹ is a protecting group;
[0481] [symbol] is an optional double bond; and
[0482] the intersubunit is bridging two optionally modified nucleosides.

[0483] In an embodiment, when C is O⁻, either A or D is not O.

[0484] In an embodiment, D is CH₂. In another embodiment, the modified intersubunit linkage of Formula VIII is a modified intersubunit linkage of Formula (IX):

[chemical structure]

[0485] In an embodiment, D is O. In another embodiment, the modified intersubunit linkage of Formula VIII is a modified intersubunit linkage of Formula (X):

[chemical structure]

[0486] In an embodiment, D is CH₂. In another embodiment, the modified intersubunit linkage of Formula (VIII) is a modified intersubunit linkage of Formula (XI):

[chemical structure]

[0487] In an embodiment, D is CH. In another embodiment, the modified intersubunit linkage of Formula VIII is a modified intersubunit linkage of Formula (XII):

[chemical structure]

[0488] In another embodiment, the modified intersubunit linkage of Formula (VII) is a modified intersubunit linkage of Formula (XIV):

[chemical structure]

[0489] In an embodiment, D is OCH₂. In another embodiment, the modified intersubunit linkage of Formula (VII) is a modified intersubunit linkage of Formula (XIII):

[chemical structure]

[0490] In another embodiment, the modified intersubunit linkage of Formula (VII) is a modified intersubunit linkage of Formula (XXa):

[chemical structure]

[0491] In an embodiment of the modified siRNA linkage, each optionally modified nucleoside is independently, at each occurrence, selected from the group consisting of adenosine, guanosine, cytidine, and uridine.

[0492] In certain exemplary embodiments of Formula (I), W is O. In another embodiment, W is CH₂. In yet another embodiment, W is CH.

[0493] In certain exemplary embodiments of Formula (I), X is OH. In another embodiment, X is OCH₃. In yet another embodiment, X is halo.

[0494] In a certain embodiment of Formula (I), the modified siRNA does not comprise a 2′-fluoro substituent.

[0495] In an embodiment of Formula (I), Y is O⁻. In another embodiment, Y is OH. In yet another embodiment, Y is OR. In still another embodiment, Y is NH⁻. In an embodiment, Y is NH₂. In another embodiment, Y is S⁻. In yet another embodiment, Y is SH.

[0496] In an embodiment of Formula (I), Z is O. In another embodiment, Z is CH₂.

[0497] In an embodiment, the modified intersubunit linkage is inserted on position 1-2 of the antisense strand. In another embodiment, the modified intersubunit linkage is inserted on position 6-7 of the antisense strand. In yet another embodiment, the modified intersubunit linkage is inserted on position 10-11 of the antisense strand. In still another embodiment, the modified intersubunit linkage is inserted on position 19-20 of the antisense strand. In an embodiment, the modified intersubunit linkage is inserted on positions 5-6 and 18-19 of the antisense strand.

[0498] In an exemplary embodiment of the modified siRNA linkage of Formula (VIII), C is O⁻. In another embodiment, C is OH. In yet another embodiment, C is OR¹. In still another embodiment, C is NH⁻. In an embodiment, C is NH₂. In another embodiment, C is S⁻. In yet another embodiment, C is SH.

[0499] In an exemplary embodiment of the modified siRNA linkage of Formula (VIII), A is O. In another embodiment, A is CH₂. In yet another embodiment, C is OR¹. In still another embodiment, C is NH⁻. In an embodiment, C is NH₂. In another embodiment, C is S⁻. In yet another embodiment, C is SH.

[0500] In a certain embodiment of the modified siRNA linkage of Formula (VIII), the optionally modified nucleoside is adenosine. In another embodiment of the modified siRNA linkage of Formula (VIII), the optionally modified nucleoside is guanosine. In another embodiment of the modified siRNA linkage of Formula (VIII), the optionally modified nucleoside is cytidine. In another embodiment of the modified siRNA linkage of Formula (VIII), the optionally modified nucleoside is uridine.

[0501] In an embodiment of the modified siRNA linkage, wherein the linkage is inserted on position 1-2 of the antisense strand. In another embodiment, the linkage is inserted on position 6-7 of the antisense strand. In yet another embodiment, the linkage is inserted on position 10-11 of the antisense strand. In still another embodiment, the linkage is inserted on position 19-20 of the antisense strand. In an embodiment, the linkage is inserted on positions 5-6 and 18-19 of the antisense strand.

[0502] In certain embodiments of Formula (I), the base pairing moiety B is adenine. In certain embodiments of Formula (I), the base pairing moiety B is guanine. In certain embodiments of Formula (I), the base pairing moiety B is cytosine. In certain embodiments of Formula (I), the base pairing moiety B is uracil.

[0503] In an embodiment of Formula (I), W is O. In an embodiment of Formula (I), W is CH₂. In an embodiment of Formula (I), W is CH.

[0504] In an embodiment of Formula (I), X is OH. In an embodiment of Formula (I), X is OCH₃. In an embodiment of Formula (I), X is halo.

[0505] In an exemplary embodiment of Formula (I), the modified oligonucleotide does not comprise a 2′-fluoro substituent.

[0506] In an embodiment of Formula (I), Y is O⁻. In an embodiment of Formula (I), Y is OH. In an embodiment of Formula (I), Y is OR. In an embodiment of Formula (I), Y is NH⁻. In an embodiment of Formula (I), Y is NH₂. In an embodiment of Formula (I), Y is S⁻. In an embodiment of Formula (I), Y is SH.

[0507] In an embodiment of Formula (I), Z is O. In an embodiment of Formula (I), Z is CH₂.

[0508] In an embodiment of the Formula (I), the linkage is inserted on position 1-2 of the antisense strand. In another embodiment of Formula (I), the linkage is inserted on position 6-7 of the antisense strand. In yet another embodiment of Formula (I), the linkage is inserted on position 10-11 of the antisense strand. In still another embodiment of Formula (I), the linkage is inserted on position 19-20 of the antisense strand. In an embodiment of Formula (I), the linkage is inserted on positions 5-6 and 18-19 of the antisense strand.

[0509] Modified intersubunit linkages are further described in U.S. Patent Publication No. 2020/0385740A1, and U.S. Ser. No. 17/213,852, each of which is incorporated herein by reference.

### 4) Conjugated Functional Moieties

[0510] In other embodiments, RNA silencing agents may be modified with one or more functional moieties. A functional moiety is a molecule that confers one or more additional activities to the RNA silencing agent. In certain embodiments, the functional moieties enhance cellular uptake by target cells (e.g., neuronal cells). Thus, the invention includes RNA silencing agents which are conjugated or unconjugated (e.g., at its 5′ and/or 3′ terminus) to another moiety (e.g. a non-nucleic acid moiety such as a peptide), an organic compound (e.g., a dye), or the like. The conjugation can be accomplished by methods known in the art, e.g., using the methods of Lambert et al., Drug Deliv. Rev.: 47(1), 99-112 (2001) (describes nucleic acids loaded to polyalkylcyanoacrylate (PACA) nanoparticles); Fattal et al., J. Control Release 53(1-3): 137-43 (1998) (describes nucleic acids bound to nanoparticles); Schwab et al., Ann. Oncol. 5 Suppl. 4:55-8 (1994) (describes nucleic acids linked to intercalating agents, hydrophobic groups, polycations or PACA nanoparticles); and Godard et al., Eur. J. Biochem. 232(2):404-10 (1995) (describes nucleic acids linked to nanoparticles).

[0511] In a certain embodiment, the functional moiety is a hydrophobic moiety. In a certain embodiment, the hydrophobic moiety is selected from the group consisting of fatty acids, steroids, secosteroids, lipids, gangliosides and nucleoside analogs, endocannabinoids, and vitamins. In a certain embodiment, the steroid selected from the group consisting of cholesterol and Lithocholic acid (LCA). In a certain embodiment, the fatty acid selected from the group consisting of Eicosapentaenoic acid (EPA), Docosahexaenoic acid (DHA) and Docosanoic acid (DCA). In a certain embodiment, the vitamin selected from the group consisting of choline, vitamin A, vitamin E, and derivatives or metabolites thereof. In a certain embodiment, the vitamin is selected from the group consisting of retinoic acid and alpha-tocopheryl succinate.

[0512] In a certain embodiment, an RNA silencing agent of invention is conjugated to a lipophilic moiety. In one embodiment, the lipophilic moiety is a ligand that includes a cationic group. In another embodiment, the lipophilic moiety is attached to one or both strands of an siRNA. In an exemplary embodiment, the lipophilic moiety is attached to one end of the sense strand of the siRNA. In another exemplary embodiment, the lipophilic moiety is attached to the 3′ end of the sense strand. In certain embodiments, the lipophilic moiety is selected from the group consisting of cholesterol, vitamin E, vitamin K, vitamin A, folic acid, a cationic dye (e.g., Cy3). In an exemplary embodiment, the lipophilic moiety is cholesterol. Other lipophilic moieties include cholic acid, adamantane acetic acid, 1-pyrene butyric acid, dihydrotestosterone, 1,3-Bis-O(hexadecyl)glycerol, geranyloxyhexyl group, hexadecylglycerol, borneol, menthol, 1,3-propanediol, heptadecyl group, palmitic acid, myristic acid, O3-(oleoyl)lithocholic acid, O3-(oleoyl)cholenic acid, dimethoxytrityl, or phenoxazine.

[0513] In certain embodiments, the functional moieties may comprise one or more ligands tethered to an RNA silencing agent to improve stability, hybridization thermodynamics with a target nucleic acid, targeting to a particular tissue or cell-type, or cell permeability, e.g., by an endocytosis-dependent or -independent mechanism. Ligands and associated modifications can also increase sequence specificity and consequently decrease off-site targeting. A tethered ligand can include one or more modified bases or sugars that can function as intercalators. These can be located in an internal region, such as in a bulge of RNA silencing agent/target duplex. The intercalator can be an aromatic, e.g., a polycyclic aromatic or heterocyclic aromatic compound. A polycyclic intercalator can have stacking capabilities, and can include systems with 2, 3, or 4 fused rings. The universal bases described herein can be included on a ligand. In one embodiment, the ligand can include a cleaving group that contributes to target gene inhibition by cleavage of the target nucleic acid. The cleaving group can be, for example, a bleomycin (e.g., bleomycin-A5, bleomycin-A2, or bleomycin-B2), pyrene, phenanthroline (e.g., O-phenanthroline), a polyamine, a tripeptide (e.g., lys-tyr-lys tripeptide), or a metal ion chelating group. The metal ion chelating group can include, e.g., an Lu(III) or EU(III) macrocyclic complex, a Zn(II) 2,9-dimethylphenanthroline derivative, a Cu(II) terpyridine, or acridine, which can promote the selective cleavage of target RNA at the site of the bulge by free metal ions, such as Lu(III). In some embodiments, a peptide ligand can be tethered to a RNA silencing agent to promote cleavage of the target RNA, e.g., at the bulge region. For example, 1,8-dimethyl-1,3,6,8,10,13-hexaazacyclotetradecane (cyclam) can be conjugated to a peptide (e.g., by an amino acid derivative) to promote target RNA cleavage. A tethered ligand can be an aminoglycoside ligand, which can cause an RNA silencing agent to have improved hybridization properties or improved sequence specificity. Exemplary aminoglycosides include glycosylated polylysine, galactosylated polylysine, neomycin B, tobramycin, kanamycin A, and acridine conjugates of aminoglycosides, such as Neo-N-acridine, Neo-S-acridine, Neo-C-acridine, Tobra-N-acridine, and KanaA-N-acridine. Use of an acridine analog can increase sequence specificity. For example, neomycin B has a high affinity for RNA as compared to DNA, but low sequence-specificity. An acridine analog, neo-5-acridine, has an increased affinity for the HIV Rev-response element (RRE). In some embodiments, the guanidine analog (the guanidinoglycoside) of an aminoglycoside ligand is tethered to an RNA silencing agent. In a guanidinoglycoside, the amine group on the amino acid is exchanged for a guanidine group. Attachment of a guanidine analog can enhance cell permeability of an RNA silencing agent. A tethered ligand can be a poly-arginine peptide, peptoid or peptidomimetic, which can enhance the cellular uptake of an oligonucleotide agent.

[0514] Exemplary ligands are coupled, either directly or indirectly, via an intervening tether, to a ligand-conjugated carrier. In certain embodiments, the coupling is through a covalent bond. In certain embodiments, the ligand is attached to the carrier via an intervening tether. In certain embodiments, a ligand alters the distribution, targeting or lifetime of an RNA silencing agent into which it is incorporated. In certain embodiments, a ligand provides an enhanced affinity for a selected target, e.g., molecule, cell or cell type, compartment, e.g., a cellular or organ compartment, tissue, organ or region of the body, as, e.g., compared to a species absent such a ligand.

[0515] Exemplary ligands can improve transport, hybridization, and specificity properties and may also improve nuclease resistance of the resultant natural or modified RNA silencing agent, or a polymeric molecule comprising any combination of monomers described herein and/or natural or modified ribonucleotides. Ligands in general can include therapeutic modifiers, e.g., for enhancing uptake; diagnostic compounds or reporter groups e.g., for monitoring distribution; cross-linking agents; nuclease-resistance conferring moieties; and natural or unusual nucleobases. General examples include lipophiles, lipids, steroids (e.g., uvaol, hecigenin, diosgenin), terpenes (e.g., triterpenes, e.g., sarsasapogenin, Friedelin, epifriedelanol derivatized lithocholic acid), vitamins (e.g., folic acid, vitamin A, biotin, pyridoxal), carbohydrates, proteins, protein binding agents, integrin targeting molecules, polycationics, peptides, polyamines, and peptide mimics. Ligands can include a naturally occurring substance, (e.g., human serum albumin (HSA), low-density lipoprotein (LDL), or globulin); carbohydrate (e.g., a dextran, pullulan, chitin, chitosan, inulin, cyclodextrin or hyaluronic acid); amino acid, or a lipid. The ligand may also be a recombinant or synthetic molecule, such as a synthetic polymer, e.g., a synthetic polyamino acid. Examples of polyamino acids include polyamino acid is a polylysine (PLL), poly L-aspartic acid, poly L-glutamic acid, styrene-maleic acid anhydride copolymer, poly(L-lactide-co-glycolied) copolymer, divinyl ether-maleic anhydride copolymer, N-(2-hydroxypropyl)methacrylamide copolymer (HMPA), polyethylene glycol (PEG), polyvinyl alcohol (PVA), polyurethane, poly(2-ethylacryllic acid), N-isopropylacrylamide polymers, or polyphosphazine. Example of polyamines include: polyethylenimine, polylysine (PLL), spermine, spermidine, polyamine, pseudopeptide-polyamine, peptidomimetic polyamine, dendrimer polyamine, arginine, amidine, protamine, cationic lipid, cationic porphyrin, quaternary salt of a polyamine, or an alpha helical peptide.

[0516] Ligands can also include targeting groups, e.g., a cell or tissue targeting agent, e.g., a lectin, glycoprotein, lipid or protein, e.g., an antibody, that binds to a specified cell type such as a kidney cell. A targeting group can be a thyrotropin, melanotropin, lectin, glycoprotein, surfactant protein A, mucin carbohydrate, multivalent lactose, multivalent galactose, N-acetyl-galactosamine (GalNAc) or derivatives thereof, N-acetyl-glucosamine, multivalent mannose, multivalent fucose, glycosylated polyaminoacids, multivalent galactose, transferrin, bisphosphonate, polyglutamate, polyaspartate, a lipid, cholesterol, a steroid, bile acid, folate, vitamin B12, biotin, or an RGD peptide or RGD peptide mimetic. Other examples of ligands include dyes, intercalating agents (e.g. acridines and substituted acridines), cross-linkers (e.g. psoralene, mitomycin C), porphyrins (TPPC4, texaphyrin, Sapphyrin), polycyclic aromatic hydrocarbons (e.g., phenazine, dihydrophenazine, phenanthroline, pyrenes), lys-tyr-lys tripeptide, aminoglycosides, guanidium aminoglycodies, artificial endonucleases (e.g. EDTA), lipophilic molecules, e.g, cholesterol (and thio analogs thereof), cholic acid, cholanic acid, lithocholic acid, adamantane acetic acid, 1-pyrene butyric acid, dihydrotestosterone, glycerol (e.g., esters (e.g., mono, bis, or tris fatty acid esters, e.g., C₁₀, C₁₁, C₁₂, C₁₃, C₁₄, C₁₅, C₁₆, C₁₇, C₁₈, C₁₉, or C₂₀ fatty acids) and ethers thereof, e.g., C₁₀, C₁₁, C₁₂, C₁₃, C₁₄, C₁₅, C₁₆, C₁₇, C₁₈, C₁₉, or C₂₀ alkyl; e.g., 1,3-bis-O(hexadecyl)glycerol, 1,3-bis-O(octaadecyl)glycerol), geranyloxyhexyl group, hexadecylglycerol, borneol, menthol, 1,3-propanediol, heptadecyl group, palmitic acid, stearic acid (e.g., glyceryl distearate), oleic acid, myristic acid, O3-(oleoyl)lithocholic acid, O3-(oleoyl)cholenic acid, dimethoxytrityl, or phenoxazine) and peptide conjugates (e.g., antennapedia peptide, Tat peptide), alkylating agents, phosphate, amino, mercapto, PEG (e.g., PEG-40K), MPEG, [MPEG]2, polyamino, alkyl, substituted alkyl, radiolabeled markers, enzymes, haptens (e.g. biotin), transport/absorption facilitators (e.g., aspirin, naproxen, vitamin E, folic acid), synthetic ribonucleases (e.g., imidazole, bisimidazole, histamine, imidazole clusters, acridine-imidazole conjugates, Eu³⁺ complexes of tetraazamacrocycles), dinitrophenyl, HRP or AP. In certain embodiments, the ligand is GalNAc or a derivative thereof.

[0517] Ligands can be proteins, e.g., glycoproteins, or peptides, e.g., molecules having a specific affinity for a co-ligand, or antibodies e.g., an antibody, that binds to a specified cell type such as a cancer cell, endothelial cell, or bone cell. Ligands may also include hormones and hormone receptors. They can also include non-peptidic species, such as lipids, lectins, carbohydrates, vitamins, cofactors, multivalent lactose, multivalent galactose, N-acetyl-galactosamine, N-acetyl-glucosamine multivalent mannose, or multivalent fucose. The ligand can be, for example, a lipopolysaccharide, an activator of p38 MAP kinase, or an activator of NF-κB.

[0518] The ligand can be a substance, e.g., a drug, which can increase the uptake of the RNA silencing agent into the cell, for example, by disrupting the cell's cytoskeleton, e.g., by disrupting the cell's microtubules, microfilaments, and/or intermediate filaments. The drug can be, for example, taxon, vincristine, vinblastine, cytochalasin, nocodazole, japlakinolide, latrunculin A, phalloidin, swinholide A, indanocine, or myoservin. The ligand can increase the uptake of the RNA silencing agent into the cell by activating an inflammatory response, for example. Exemplary ligands that would have such an effect include tumor necrosis factor alpha (TNFα), interleukin-1 beta, or gamma interferon. In one aspect, the ligand is a lipid or lipid-based molecule. Such a lipid or lipid-based molecule can bind a serum protein, e.g., human serum albumin (HSA). An HSA binding ligand allows for distribution of the conjugate to a target tissue, e.g., a non-kidney target tissue of the body. For example, the target tissue can be the liver, including parenchymal cells of the liver. Other molecules that can bind HSA can also be used as ligands. For example, neproxin or aspirin can be used. A lipid or lipid-based ligand can (a) increase resistance to degradation of the conjugate, (b) increase targeting or transport into a target cell or cell membrane, and/or (c) can be used to adjust binding to a serum protein, e.g., HSA. A lipid based ligand can be used to modulate, e.g., control the binding of the conjugate to a target tissue. For example, a lipid or lipid-based ligand that binds to HSA more strongly will be less likely to be targeted to the kidney and therefore less likely to be cleared from the body. A lipid or lipid-based ligand that binds to HSA less strongly can be used to target the conjugate to the kidney. In a certain embodiment, the lipid based ligand binds HSA. A lipid-based ligand can bind HSA with a sufficient affinity such that the conjugate will be distributed to a non-kidney tissue. However, it is contemplated that the affinity not be so strong that the HSA-ligand binding cannot be reversed. In another embodiment, the lipid based ligand binds HSA weakly or not at all, such that the conjugate will be distributed to the kidney. Other moieties that target to kidney cells can also be used in place of or in addition to the lipid based ligand.

[0519] In another aspect, the ligand is a moiety, e.g., a vitamin, which is taken up by a target cell, e.g., a proliferating cell. These can be useful for treating disorders characterized by unwanted cell proliferation, e.g., of the malignant or non-malignant type, e.g., cancer cells. Exemplary vitamins include vitamin A, E, and K. Other exemplary vitamins include are B vitamin, e.g., folic acid, B12, riboflavin, biotin, pyridoxal or other vitamins or nutrients taken up by cancer cells. Also included are HSA and low density lipoprotein (LDL).

[0520] In another aspect, the ligand is a cell-permeation agent, such as a helical cell-permeation agent. In certain embodiments, the agent is amphipathic. An exemplary agent is a peptide such as tat or antennopedia. If the agent is a peptide, it can be modified, including a peptidylmimetic, invertomers, non-peptide or pseudo-peptide linkages, and use of D-amino acids. The helical agent can be an alpha-helical agent, which may have a lipophilic and a lipophobic phase.

[0521] The ligand can be a peptide or peptidomimetic. A peptidomimetic (also referred to herein as an oligopeptidomimetic) is a molecule capable of folding into a defined three-dimensional structure similar to a natural peptide. The attachment of peptide and peptidomimetics to oligonucleotide agents can affect pharmacokinetic distribution of the RNA silencing agent, such as by enhancing cellular recognition and absorption. The peptide or peptidomimetic moiety can be about 5-50 amino acids long, e.g., about 5, 10, 15, 20, 25, 30, 35, 40, 45, or 50 amino acids long. A peptide or peptidomimetic can be, for example, a cell permeation peptide, cationic peptide, amphipathic peptide, or hydrophobic peptide (e.g., consisting primarily of Tyr, Trp or Phe). The peptide moiety can be a dendrimer peptide, constrained peptide or crosslinked peptide. The peptide moiety can be an L-peptide or D-peptide. In another alternative, the peptide moiety can include a hydrophobic membrane translocation sequence (MTS). A peptide or peptidomimetic can be encoded by a random sequence of DNA, such as a peptide identified from a phage-display library, or one-bead-one-compound (OBOC) combinatorial library (Lam et al., Nature 354:82-84, 1991). In exemplary embodiments, the peptide or peptidomimetic tethered to an RNA silencing agent via an incorporated monomer unit is a cell targeting peptide such as an arginine-glycine-aspartic acid (RGD)-peptide, or RGD mimic. A peptide moiety can range in length from about 5 amino acids to about 40 amino acids. The peptide moieties can have a structural modification, such as to increase stability or direct conformational properties. Any of the structural modifications described below can be utilized.

[0522] In certain embodiments, the functional moiety is linked to the 5′ end and/or 3′ end of the RNA silencing agent of the disclosure. In certain embodiments, the functional moiety is linked to the 5′ end and/or 3′ end of an antisense strand of the RNA silencing agent of the disclosure. In certain embodiments, the functional moiety is linked to the 5′ end and/or 3′ end of a sense strand of the RNA silencing agent of the disclosure. In certain embodiments, the functional moiety is linked to the 3′ end of a sense strand of the RNA silencing agent of the disclosure.

[0523] In certain embodiments, the functional moiety is linked to the RNA silencing agent by a linker. In certain embodiments, the functional moiety is linked to the antisense strand and/or sense strand by a linker. In certain embodiments, the functional moiety is linked to the 3′ end of a sense strand by a linker. In certain embodiments, the linker comprises a divalent or trivalent linker. In certain embodiments, the linker comprises an ethylene glycol chain, an alkyl chain, a peptide, RNA, DNA, a phosphodiester, a phosphorothioate, a phosphoramidate, an amide, a carbamate, or a combination thereof. In certain embodiments, the divalent or trivalent linker is selected from:

[chemical structure]

wherein n is 1, 2, 3, 4, or 5.

[0524] In certain embodiments, the linker further comprises a phosphodiester or phosphodiester derivative. In certain embodiments, the phosphodiester or phosphodiester derivative is selected from the group consisting of:

[chemical structure]

[0525] wherein X is O, S or BH₃.

[0526] The various functional moieties of the disclosure and means to conjugate them to RNA silencing agents are described in further detail in WO2017/030973A1 and WO2018/031933A2, incorporated herein by reference.

### VI. Branched Oligonucleotides

[0527] Two or more RNA silencing agents as disclosed supra, for example oligonucleotide constructs such as anti-HTT-1A siRNAs, may be connected to one another by one or more moieties independently selected from a linker, a spacer and a branching point, to form a branched oligonucleotide RNA silencing agent. In certain embodiments, the branched oligonucleotide RNA silencing agent consists of two siRNAs to form a di-branched siRNA (“di-siRNA”) scaffolding for delivering two siRNAs. In representative embodiments, the nucleic acids of the branched oligonucleotide each comprise an antisense strand (or portions thereof), wherein the antisense strand has sufficient complementarity to a target mRNA (e.g., HTT-1A mRNA) to mediate an RNA-mediated silencing mechanism (e.g. RNAi).

[0528] In exemplary embodiments, the branched oligonucleotides may have two to eight RNA silencing agents attached through a linker. The linker may be hydrophobic. In an embodiment, branched oligonucleotides of the present application have two to three oligonucleotides. In an embodiment, the oligonucleotides independently have substantial chemical stabilization (e.g., at least 40% of the constituent bases are chemically-modified). In an exemplary embodiment, the oligonucleotides have full chemical stabilization (i.e., all the constituent bases are chemically-modified). In some embodiments, branched oligonucleotides comprise one or more single-stranded phosphorothioated tails, each independently having two to twenty nucleotides. In a non-limiting embodiment, each single-stranded tail has two to ten nucleotides.

[0529] In certain embodiments, branched oligonucleotides are characterized by three properties: (1) a branched structure, (2) full metabolic stabilization, and (3) the presence of a single-stranded tail comprising phosphorothioate linkers. In certain embodiments, branched oligonucleotides have 2 or 3 branches. It is believed that the increased overall size of the branched structures promotes increased uptake. Also, without being bound by a particular theory of activity, multiple adjacent branches (e.g., 2 or 3) are believed to allow each branch to act cooperatively and thus dramatically enhance rates of internalization, trafficking and release.

[0530] Branched oligonucleotides are provided in various structurally diverse embodiments. In some embodiments nucleic acids attached at the branching points are single stranded or double stranded and consist of miRNA inhibitors, gapmers, mixmers, SSOs, PMOs, or PNAs. These single strands can be attached at their 3′ or 5′ end. Combinations of siRNA and single stranded oligonucleotides could also be used for dual function. In another embodiment, short nucleic acids complementary to the gapmers, mixmers, miRNA inhibitors, SSOs, PMOs, and PNAs are used to carry these active single-stranded nucleic acids and enhance distribution and cellular internalization. The short duplex region has a low melting temperature (Tm ˜37° C.) for fast dissociation upon internalization of the branched structure into the cell.

[0531] The Di-siRNA branched oligonucleotides may comprise chemically diverse conjugates, such as the functional moieties described above. Conjugated bioactive ligands may be used to enhance cellular specificity and to promote membrane association, internalization, and serum protein binding. Examples of bioactive moieties to be used for conjugation include DHA, GalNAc, and cholesterol. These moieties can be attached to Di-siRNA either through the connecting linker or spacer, or added via an additional linker or spacer attached to another free siRNA end.

[0532] The presence of a branched structure improves the level of tissue retention in the brain more than 100-fold compared to non-branched compounds of identical chemical composition, suggesting a new mechanism of cellular retention and distribution. Branched oligonucleotides have unexpectedly uniform distribution throughout the spinal cord and brain. Moreover, branched oligonucleotides exhibit unexpectedly efficient systemic delivery to a variety of tissues, and very high levels of tissue accumulation.

[0533] Branched oligonucleotides comprise a variety of therapeutic nucleic acids, including siRNAs, ASOs, miRNAs, miRNA inhibitors, splice switching, PMOs, PNAs. In some embodiments, branched oligonucleotides further comprise conjugated hydrophobic moieties and exhibit unprecedented silencing and efficacy in vitro and in vivo.

### Linkers

[0534] In an embodiment of the branched oligonucleotide, each linker is independently selected from an ethylene glycol chain, an alkyl chain, a peptide, RNA, DNA, a phosphate, a phosphonate, a phosphoramidate, an ester, an amide, a triazole, and combinations thereof; wherein any carbon or oxygen atom of the linker is optionally replaced with a nitrogen atom, bears a hydroxyl substituent, or bears an oxo substituent. In one embodiment, each linker is an ethylene glycol chain. In another embodiment, each linker is an alkyl chain. In another embodiment, each linker is a peptide. In another embodiment, each linker is RNA. In another embodiment, each linker is DNA. In another embodiment, each linker is a phosphate. In another embodiment, each linker is a phosphonate. In another embodiment, each linker is a phosphoramidate. In another embodiment, each linker is an ester. In another embodiment, each linker is an amide. In another embodiment, each linker is a triazole.

### VII. Compound of Formula (I)

[0535] In another aspect, provided herein is a branched oligonucleotide compound of formula (I):

L-(N)ₙ (I)
[0536] wherein L is selected from an ethylene glycol chain, an alkyl chain, a peptide, RNA, DNA, a phosphate, a phosphonate, a phosphoramidate, an ester, an amide, a triazole, and combinations thereof, wherein formula (I) optionally further comprises one or more branch point B, and one or more spacer S; wherein B is independently for each occurrence a polyvalent organic species or derivative thereof; S is independently for each occurrence selected from an ethylene glycol chain, an alkyl chain, a peptide, RNA, DNA, a phosphate, a phosphonate, a phosphoramidate, an ester, an amide, a triazole, and combinations thereof.

[0537] Moiety N is an RNA duplex comprising a sense strand and an antisense strand; and n is 2, 3, 4, 5, 6, 7 or 8. In an embodiment, the antisense strand of N comprises a sequence substantially complementary to a HTT-1A nucleic acid sequence of any one of the sequences recited in Table 18. In further embodiments, N includes strands that are capable of targeting one or more of a HTT-1A nucleic acid sequence of any one of the sequences recited in Table 19. The sense strand and antisense strand may each independently comprise one or more chemical modifications.

[0538] In an embodiment, the compound of formula (I) has a structure selected from formulas (I-1)-(I-9) of Table 1.

TABLE 1
N—L—N
(I-1)
N—S—L—S—N
(I-2) [chemical structure]
(I-3) [chemical structure]
(I-4) [chemical structure]
(I-5) [chemical structure]
(I-6) [chemical structure]
(I-7) [chemical structure]
(I-8) [chemical structure]
(I-9)

[0539] In one embodiment, the compound of formula (I) is formula (I-1). In another embodiment, the compound of formula (I) is formula (I-2). In another embodiment, the compound of formula (I) is formula (I-3). In another embodiment, the compound of formula (I) is formula (I-4). In another embodiment, the compound of formula (I) is formula (I-5). In another embodiment, the compound of formula (I) is formula (I-6). In another embodiment, the compound of formula (I) is formula (I-7). In another embodiment, the compound of formula (I) is formula (I-8). In another embodiment, the compound of formula (I) is formula (I-9).

[0540] In an embodiment of the compound of formula (I), each linker is independently selected from an ethylene glycol chain, an alkyl chain, a peptide, RNA, DNA, a phosphate, a phosphonate, a phosphoramidate, an ester, an amide, a triazole, and combinations thereof; wherein any carbon or oxygen atom of the linker is optionally replaced with a nitrogen atom, bears a hydroxyl substituent, or bears an oxo substituent. In one embodiment of the compound of formula (I), each linker is an ethylene glycol chain. In another embodiment, each linker is an alkyl chain. In another embodiment of the compound of formula (I), each linker is a peptide. In another embodiment of the compound of formula (I), each linker is RNA. In another embodiment of the compound of formula (I), each linker is DNA. In another embodiment of the compound of formula (I), each linker is a phosphate. In another embodiment, each linker is a phosphonate. In another embodiment of the compound of formula (I), each linker is a phosphoramidate. In another embodiment of the compound of formula (I), each linker is an ester. In another embodiment of the compound of formula (I), each linker is an amide. In another embodiment of the compound of formula (I), each linker is a triazole.

[0541] In one embodiment of the compound of formula (I), B is a polyvalent organic species. In another embodiment of the compound of formula (I), B is a derivative of a polyvalent organic species. In one embodiment of the compound of formula (I), B is a triol or tetrol derivative. In another embodiment, B is a tri- or tetra-carboxylic acid derivative. In another embodiment, B is an amine derivative. In another embodiment, B is a tri- or tetra-amine derivative. In another embodiment, B is an amino acid derivative. In another embodiment of the compound of formula (I), B is selected from the structures:

[chemical structure]

[chemical structure]

[0542] Polyvalent organic species are moieties comprising carbon and three or more valencies (i.e., points of attachment with moieties such as S, L or N, as defined above). Non-limiting examples of polyvalent organic species include triols (e.g., glycerol, phloroglucinol, and the like), tetrols (e.g., ribose, pentaerythritol, 1,2,3,5-tetrahydroxybenzene, and the like), tri-carboxylic acids (e.g., citric acid, 1,3,5-cyclohexanetricarboxylic acid, trimesic acid, and the like), tetra-carboxylic acids (e.g., ethylenediaminetetraacetic acid, pyromellitic acid, and the like), tertiary amines (e.g., tripropargylamine, triethanolamine, and the like), triamines (e.g., diethylenetriamine and the like), tetramines, and species comprising a combination of hydroxyl, thiol, amino, and/or carboxyl moieties (e.g., amino acids such as lysine, serine, cysteine, and the like).

[0543] In an embodiment of the compound of formula (I), each nucleic acid comprises one or more chemically-modified nucleotides. In an embodiment of the compound of formula (I), each nucleic acid consists of chemically-modified nucleotides. In certain embodiments of the compound of formula (I), >95%, >90%, >85%, >80%, >75%, >70%, >65%, >60%, >55% or >50% of each nucleic acid comprises chemically-modified nucleotides.

[0544] In an embodiment, each antisense strand independently comprises a 5′ terminal group R selected from the groups of Table 2.

TABLE 2 [chemical structure]
R¹ [chemical structure]
R² [chemical structure]
R³ [chemical structure]
R⁴ [chemical structure]
R⁵ [chemical structure]
R⁶ [chemical structure]
R⁷ [chemical structure]
R⁸

[0545] In one embodiment. R is R₁. In another embodiment. R is R₂. In another embodiment. R is R₃. In another embodiment. R is R₄. In another embodiment. R is R₅. In another embodiment, R is R₆. In another embodiment, R is R₇. In another embodiment, R is R₈.

### Structure of Formula (II)

[0546] In an embodiment, the compound of formula (I) has the structure of formula (II):

[chemical structure]

[0547] wherein X, for each occurrence, independently, is selected from adenosine, guanosine, uridine, cytidine, and chemically-modified derivatives thereof; Y, for each occurrence, independently, is selected from adenosine, guanosine, uridine, cytidine, and chemically-modified derivatives thereof; - represents a phosphodiester internucleoside linkage; = represents a phosphorothioate internucleoside linkage; and - - - represents, individually for each occurrence, a base-pairing interaction or a mismatch.

[0548] In certain embodiments, the structure of formula (II) does not contain mismatches. In one embodiment, the structure of formula (II) contains 1 mismatch. In another embodiment, the compound of formula (II) contains 2 mismatches. In another embodiment, the compound of formula (II) contains 3 mismatches. In another embodiment, the compound of formula (II) contains 4 mismatches. In an embodiment, each nucleic acid consists of chemically-modified nucleotides.

[0549] In certain embodiments, >95%, >90%, >85%, >80%, >75%, >70%, >65%, >60%, >55% or >50% of X's of the structure of formula (II) are chemically-modified nucleotides. In other embodiments, >95%, >90%, >85%, >80%, >75%, >70%, >65%, >60%, >55% or >50% of X's of the structure of formula (II) are chemically-modified nucleotides.

### Structure of Formula (III)

[0550] In an embodiment, the compound of formula (I) has the structure of formula (III):

[chemical structure]

[0551] wherein X, for each occurrence, independently, is a nucleotide comprising a 2′-deoxy-2′-fluoro modification; X, for each occurrence, independently, is a nucleotide comprising a 2′-O-methyl modification; Y, for each occurrence, independently, is a nucleotide comprising a 2′-deoxy-2′-fluoro modification; and Y, for each occurrence, independently, is a nucleotide comprising a 2′-O-methyl modification.

[0552] In an embodiment, X is chosen from the group consisting of 2′-deoxy-2′-fluoro modified adenosine, guanosine, uridine or cytidine. In an embodiment, X is chosen from the group consisting of 2′-O-methyl modified adenosine, guanosine, uridine or cytidine. In an embodiment, Y is chosen from the group consisting of 2′-deoxy-2′-fluoro modified adenosine, guanosine, uridine or cytidine. In an embodiment, Y is chosen from the group consisting of 2′-O-methyl modified adenosine, guanosine, uridine or cytidine.

[0553] In certain embodiments, the structure of formula (III) does not contain mismatches. In one embodiment, the structure of formula (III) contains 1 mismatch. In another embodiment, the compound of formula (III) contains 2 mismatches. In another embodiment, the compound of formula (III) contains 3 mismatches. In another embodiment, the compound of formula (III) contains 4 mismatches.

### Structure of Formula (IV)

[0554] In an embodiment, the compound of formula (I) has the structure of formula (IV):

[chemical structure]

[0555] wherein X, for each occurrence, independently, is selected from adenosine, guanosine, uridine, cytidine, and chemically-modified derivatives thereof; Y, for each occurrence, independently, is selected from adenosine, guanosine, uridine, cytidine, and chemically-modified derivatives thereof; - represents a phosphodiester internucleoside linkage; = represents a phosphorothioate internucleoside linkage; and - - - represents, individually for each occurrence, a base-pairing interaction or a mismatch.

[0556] In certain embodiments, the structure of formula (IV) does not contain mismatches. In one embodiment, the structure of formula (IV) contains 1 mismatch. In another embodiment, the compound of formula (IV) contains 2 mismatches. In another embodiment, the compound of formula (IV) contains 3 mismatches. In another embodiment, the compound of formula (IV) contains 4 mismatches. In an embodiment, each nucleic acid consists of chemically-modified nucleotides.

[0557] In certain embodiments, >95%, >90%, >85%, >80%, >75%, >70%, >65%, >60%, >55% or >50% of X's of the structure of formula (IV) are chemically-modified nucleotides. In other embodiments, >95%, >90%, >85%, >80%, >75%, >70%, >65%, >60%, >55% or >50% of X's of the structure of formula (IV) are chemically-modified nucleotides.

### Structure of Formula (V)

[0558] In an embodiment, the compound of formula (I) has the structure of formula (V):

[chemical structure]

[0559] wherein X, for each occurrence, independently, is a nucleotide comprising a 2′-deoxy-2′-fluoro modification; X, for each occurrence, independently, is a nucleotide comprising a 2′-O-methyl modification; Y, for each occurrence, independently, is a nucleotide comprising a 2′-deoxy-2′-fluoro modification; and Y, for each occurrence, independently, is a nucleotide comprising a 2′-O-methyl modification.

[0560] In certain embodiments, X is chosen from the group consisting of 2′-deoxy-2′-fluoro modified adenosine, guanosine, uridine or cytidine. In an embodiment, X is chosen from the group consisting of 2′-O-methyl modified adenosine, guanosine, uridine or cytidine. In an embodiment, Y is chosen from the group consisting of 2′-deoxy-2′-fluoro modified adenosine, guanosine, uridine or cytidine. In an embodiment, Y is chosen from the group consisting of 2′-O-methyl modified adenosine, guanosine, uridine or cytidine.

[0561] In certain embodiments, the structure of formula (V) does not contain mismatches. In one embodiment, the structure of formula (V) contains 1 mismatch. In another embodiment, the compound of formula (V) contains 2 mismatches. In another embodiment, the compound of formula (V) contains 3 mismatches. In another embodiment, the compound of formula (V) contains 4 mismatches.

### Variable Linkers

[0562] In an embodiment of the compound of formula (I), L has the structure of L1:

[chemical structure]

[0563] In an embodiment of L1, R is R³ and n is 2.

[0564] In an embodiment of the structure of formula (II), L has the structure of L1. In an embodiment of the structure of formula (III), L has the structure of L1. In an embodiment of the structure of formula (IV), L has the structure of L1. In an embodiment of the structure of formula (V), L has the structure of L1. In an embodiment of the structure of formula (VI), L has the structure of L1. In an embodiment of the structure of formula (VI), L has the structure of L1.

[0565] In an embodiment of the compound of formula (I), L has the structure of L2:

[chemical structure]

[0566] In an embodiment of L2, R is R³ and n is 2. In an embodiment of the structure of formula (II), L has the structure of L2. In an embodiment of the structure of formula (III), L has the structure of L2. In an embodiment of the structure of formula (IV), L has the structure of L2. In an embodiment of the structure of formula (V), L has the structure of L2. In an embodiment of the structure of formula (VI), L has the structure of L2. In an embodiment of the structure of formula (VI), L has the structure of L2.

### Delivery System

[0567] In a third aspect, provided herein is a delivery system for therapeutic nucleic acids having the structure of formula (VI):

L-(cNA)ₙ (VI)

[0568] wherein L is selected from an ethylene glycol chain, an alkyl chain, a peptide, RNA, DNA, a phosphate, a phosphonate, a phosphoramidate, an ester, an amide, a triazole, and combinations thereof, wherein formula (VI) optionally further comprises one or more branch point B, and one or more spacer S; wherein B is independently for each occurrence a polyvalent organic species or derivative thereof; S is independently for each occurrence selected from an ethylene glycol chain, an alkyl chain, a peptide, RNA, DNA, a phosphate, a phosphonate, a phosphoramidate, an ester, an amide, a triazole, and combinations thereof; each cNA, independently, is a carrier nucleic acid comprising one or more chemical modifications; and n is 2, 3, 4, 5, 6, 7 or 8.

[0569] In one embodiment of the delivery system, L is an ethylene glycol chain. In another embodiment of the delivery system, L is an alkyl chain. In another embodiment of the delivery system, L is a peptide. In another embodiment of the delivery system, L is RNA. In another embodiment of the delivery system, L is DNA. In another embodiment of the delivery system, L is a phosphate. In another embodiment of the delivery system, L is a phosphonate. In another embodiment of the delivery system, L is a phosphoramidate. In another embodiment of the delivery system, L is an ester. In another embodiment of the delivery system, L is an amide. In another embodiment of the delivery system, L is a triazole.

[0570] In one embodiment of the delivery system, S is an ethylene glycol chain. In another embodiment, S is an alkyl chain. In another embodiment of the delivery system, S is a peptide. In another embodiment, S is RNA. In another embodiment of the delivery system, S is DNA. In another embodiment of the delivery system, S is a phosphate. In another embodiment of the delivery system, S is a phosphonate. In another embodiment of the delivery system, S is a phosphoramidate. In another embodiment of the delivery system, S is an ester. In another embodiment, S is an amide. In another embodiment, S is a triazole.

[0571] In one embodiment of the delivery system, n is 2. In another embodiment of the delivery system, n is 3. In another embodiment of the delivery system, n is 4. In another embodiment of the delivery system, n is 5. In another embodiment of the delivery system, n is 6. In another embodiment of the delivery system, n is 7. In another embodiment of the delivery system, n is 8.

[0572] In certain embodiments, each cNA comprises >95%, >90%, >85%, >80%, >75%, >70%, >65%, >60%, >55% or >50% chemically-modified nucleotides.

[0573] In an embodiment, the compound of formula (VI) has a structure selected from formulas (VI-1)-(VI-9) of Table 3:

TABLE 3
ANc—L—cNA
(VI-1)
ANc-S-L-S-cNA
(VI-2) [chemical structure]
(VI-3) [chemical structure]
(VI-4) [chemical structure]
(VI-5) [chemical structure]
(VI-6) [chemical structure]
(VI-7) [chemical structure]
(VI-8) [chemical structure]
(VI-9)

[0574] In an embodiment, the compound of formula (VI) is the structure of formula (VI-1). In an embodiment, the compound of formula (VI) is the structure of formula (VI-2). In an embodiment, the compound of formula (VI) is the structure of formula (VI-3). In an embodiment, the compound of formula (VI) is the structure of formula (VI-4). In an embodiment, the compound of formula (VI) is the structure of formula (VI-5). In an embodiment, the compound of formula (VI) is the structure of formula (VI-6). In an embodiment, the compound of formula (VI) is the structure of formula (VI-7). In an embodiment, the compound of formula (VI) is the structure of formula (VI-8). In an embodiment, the compound of formula (VI) is the structure of formula (VI-9).

[0575] In an embodiment, the compound of formulas (VI) (including, e.g., formulas (VI-1)-(VI-9), each cNA independently comprises at least 15 contiguous nucleotides. In an embodiment, each cNA independently consists of chemically-modified nucleotides.

[0576] In an embodiment, the delivery system further comprises n therapeutic nucleic acids (NA), wherein each NA comprises a sequence substantially complementary to a HTT-1A nucleic acid sequence of any one of the sequences recited in Table 18. In further embodiments, NA includes strands that are capable of targeting one or more of a HTT-1A nucleic acid sequence of any one of the sequences recited in Table 19.

[0577] Also, each NA is hybridized to at least one cNA. In one embodiment, the delivery system is comprised of 2 NAs. In another embodiment, the delivery system is comprised of 3 NAs. In another embodiment, the delivery system is comprised of 4 NAs. In another embodiment, the delivery system is comprised of 5 NAs. In another embodiment, the delivery system is comprised of 6 NAs. In another embodiment, the delivery system is comprised of 7 NAs. In another embodiment, the delivery system is comprised of 8 NAs.

[0578] In an embodiment, each NA independently comprises at least 15 contiguous nucleotides. In an embodiment, each NA independently comprises 15-25 contiguous nucleotides. In an embodiment, each NA independently comprises 15 contiguous nucleotides. In an embodiment, each NA independently comprises 16 contiguous nucleotides. In another embodiment, each NA independently comprises 17 contiguous nucleotides. In another embodiment, each NA independently comprises 18 contiguous nucleotides. In another embodiment, each NA independently comprises 19 contiguous nucleotides. In another embodiment, each NA independently comprises 20 contiguous nucleotides. In an embodiment, each NA independently comprises 21 contiguous nucleotides. In an embodiment, each NA independently comprises 22 contiguous nucleotides. In an embodiment, each NA independently comprises 23 contiguous nucleotides. In an embodiment, each NA independently comprises 24 contiguous nucleotides. In an embodiment, each NA independently comprises 25 contiguous nucleotides.

[0579] In an embodiment, each NA comprises an unpaired overhang of at least 2 nucleotides. In another embodiment, each NA comprises an unpaired overhang of at least 3 nucleotides. In another embodiment, each NA comprises an unpaired overhang of at least 4 nucleotides. In another embodiment, each NA comprises an unpaired overhang of at least 5 nucleotides. In another embodiment, each NA comprises an unpaired overhang of at least 6 nucleotides. In an embodiment, the nucleotides of the overhang are connected via phosphorothioate linkages.

[0580] In an embodiment, each NA, independently, is selected from the group consisting of: DNA, siRNAs, antagomiRs, miRNAs, gapmers, mixmers, or guide RNAs. In one embodiment, each NA, independently, is a DNA. In another embodiment, each NA, independently, is a siRNA. In another embodiment, each NA, independently, is an antagomiR. In another embodiment, each NA, independently, is a miRNA. In another embodiment, each NA, independently, is a gapmer. In another embodiment, each NA, independently, is a mixmer. In another embodiment, each NA, independently, is a guide RNA. In an embodiment, each NA is the same. In an embodiment, each NA is not the same.

[0581] In an embodiment, the delivery system further comprising n therapeutic nucleic acids (NA) has a structure selected from formulas (I), (II), (III), (IV), (V), (VI), and embodiments thereof described herein. In one embodiment, the delivery system has a structure selected from formulas (I), (II), (III), (IV), (V), (VI), and embodiments thereof described herein further comprising 2 therapeutic nucleic acids (NA). In another embodiment, the delivery system has a structure selected from formulas (I), (II), (III), (IV), (V), (VI), and embodiments thereof described herein further comprising 3 therapeutic nucleic acids (NA). In one embodiment, the delivery system has a structure selected from formulas (I), (II), (III), (IV), (V), (VI), and embodiments thereof described herein further comprising 4 therapeutic nucleic acids (NA). In one embodiment, the delivery system has a structure selected from formulas (I), (II), (III), (IV), (V), (VI), and embodiments thereof described herein further comprising 5 therapeutic nucleic acids (NA). In one embodiment, the delivery system has a structure selected from formulas (I), (II), (III), (IV), (V), (VI), and embodiments thereof described herein further comprising 6 therapeutic nucleic acids (NA). In one embodiment, the delivery system has a structure selected from formulas (I), (II), (III), (IV), (V), (VI), and embodiments thereof described herein further comprising 7 therapeutic nucleic acids (NA). In one embodiment, the delivery system has a structure selected from formulas (I), (II), (III), (IV), (V), (VI), and embodiments thereof described herein further comprising 8 therapeutic nucleic acids (NA).

[0582] In one embodiment, the delivery system has a structure selected from formulas (I), (II), (III), (IV), (V), (VI), further comprising a linker of structure L1 or L2 wherein R is R³ and n is 2. In another embodiment, the delivery system has a structure selected from formulas (I), (II), (III), (IV), (V), (VI), further comprising a linker of structure L1 wherein R is R³ and n is 2. In another embodiment, the delivery system has a structure selected from formulas (I), (II), (III), (IV), (V), (VI), further comprising a linker of structure L2 wherein R is R³ and n is 2.

[0583] In an embodiment of the delivery system, the target of delivery is selected from the group consisting of: brain, liver, skin, kidney, spleen, pancreas, colon, fat, lung, muscle, and thymus. In one embodiment, the target of delivery is the brain. In another embodiment, the target of delivery is the striatum of the brain. In another embodiment, the target of delivery is the cortex of the brain. In another embodiment, the target of delivery is the striatum of the brain. In one embodiment, the target of delivery is the liver. In one embodiment, the target of delivery is the skin. In one embodiment, the target of delivery is the kidney. In one embodiment, the target of delivery is the spleen. In one embodiment, the target of delivery is the pancreas. In one embodiment, the target of delivery is the colon. In one embodiment, the target of delivery is the fat. In one embodiment, the target of delivery is the lung. In one embodiment, the target of delivery is the muscle. In one embodiment, the target of delivery is the thymus. In one embodiment, the target of delivery is the spinal cord.

[0584] In certain embodiments, compounds of the invention are characterized by the following properties: (1) two or more branched oligonucleotides, e.g., wherein there is a non-equal number of 3′ and 5′ ends; (2) substantially chemically stabilized, e.g., wherein more than 40%, optimally 100%, of oligonucleotides are chemically modified (e.g., no RNA and optionally no DNA); and (3) phoshorothioated single oligonucleotides containing at least 3, phosphorothioated bonds. In certain embodiments, the phoshorothioated single oligonucleotides contain 4-20 phosphorothioated bonds.

[0585] It is to be understood that the methods described in this disclosure are not limited to particular methods and experimental conditions disclosed herein; as such methods and conditions may vary. It is also to be understood that the terminology used herein is for the purpose of describing particular embodiments only, and is not intended to be limiting.

[0586] Furthermore, the experiments described herein, unless otherwise indicated, use conventional molecular and cellular biological and immunological techniques within the skill of the art. Such techniques are well known to the skilled worker, and are explained fully in the literature. Sec, e.g., Ausubel, et al., ed., Current Protocols in Molecular Biology, John Wiley & Sons, Inc., NY (1987-2008), including all supplements, Molecular Cloning: A Laboratory Manual (Fourth Edition) by MR Green and J. Sambrook and Harlow et al., Antibodies: A Laboratory Manual, Chapter 14, Cold Spring Harbor Laboratory, Cold Spring Harbor (2013, 2nd edition).

[0587] Branched oligonucleotides, including synthesis and methods of use, are described in greater detail in WO2017/132669, incorporated herein by reference.

### Methods of Introducing Nucleic Acids, Vectors and Host Cells

[0588] RNA silencing agents of the invention may be directly introduced into the cell (e.g., a neural cell) (i.e., intracellularly); or introduced extracellularly into a cavity, interstitial space, into the circulation of an organism, introduced orally, or may be introduced by bathing a cell or organism in a solution containing the nucleic acid. Vascular or extravascular circulation, the blood or lymph system, and the cerebrospinal fluid are sites where the nucleic acid may be introduced.

[0589] The RNA silencing agents of the invention can be introduced using nucleic acid delivery methods known in art including injection of a solution containing the nucleic acid, bombardment by particles covered by the nucleic acid, soaking the cell or organism in a solution of the nucleic acid, or electroporation of cell membranes in the presence of the nucleic acid. Other methods known in the art for introducing nucleic acids to cells may be used, such as lipid-mediated carrier transport, chemical-mediated transport, and cationic liposome transfection such as calcium phosphate, and the like. The nucleic acid may be introduced along with other components that perform one or more of the following activities: enhance nucleic acid uptake by the cell or other-wise increase inhibition of the target gene.

[0590] Physical methods of introducing nucleic acids include injection of a solution containing the RNA, bombardment by particles covered by the RNA, soaking the cell or organism in a solution of the RNA, or electroporation of cell membranes in the presence of the RNA. A viral construct packaged into a viral particle would accomplish both efficient introduction of an expression construct into the cell and transcription of RNA encoded by the expression construct. Other methods known in the art for introducing nucleic acids to cells may be used, such as lipid-mediated carrier transport, chemical-mediated transport, such as calcium phosphate, and the like. Thus, the RNA may be introduced along with components that perform one or more of the following activities: enhance RNA uptake by the cell, inhibit annealing of single strands, stabilize the single strands, or other-wise increase inhibition of the target gene.

[0591] RNA may be directly introduced into the cell (i.e., intracellularly); or introduced extracellularly into a cavity, interstitial space, into the circulation of an organism, introduced orally, or may be introduced by bathing a cell or organism in a solution containing the RNA. Vascular or extravascular circulation, the blood or lymph system, and the cerebrospinal fluid are sites where the RNA may be introduced.

[0592] The cell having the target gene may be from the germ line or somatic, totipotent or pluripotent, dividing or non-dividing, parenchyma or epithelium, immortalized or transformed, or the like. The cell may be a stem cell or a differentiated cell. Cell types that are differentiated include adipocytes, fibroblasts, myocytes, cardiomyocytes, endothelium, neurons, glia, blood cells, megakaryocytes, lymphocytes, macrophages, neutrophils, cosinophils, basophils, mast cells, leukocytes, granulocytes, keratinocytes, chondrocytes, osteoblasts, osteoclasts, hepatocytes, and cells of the endocrine or exocrine glands.

[0593] Depending on the particular target gene and the dose of double stranded RNA material delivered, this process may provide partial or complete loss of function for the target gene. A reduction or loss of gene expression in at least 50%, 60%, 70%, 80%, 90%, 95% or 99% or more of targeted cells is exemplary. Inhibition of gene expression refers to the absence (or observable decrease) in the level of protein and/or mRNA product from a target gene. Specificity refers to the ability to inhibit the target gene without manifest effects on other genes of the cell. The consequences of inhibition can be confirmed by examination of the outward properties of the cell or organism (as presented below in the examples) or by biochemical techniques such as RNA solution hybridization, nuclease protection, Northern hybridization, reverse transcription, gene expression monitoring with a microarray, antibody binding, Enzyme Linked ImmunoSorbent Assay (ELISA), Western blotting, RadioImmunoAssay (RIA), other immunoassays, and Fluorescence Activated Cell Sorting (FACS).

[0594] For RNA-mediated inhibition in a cell line or whole organism, gene expression is conveniently assayed by use of a reporter or drug resistance gene whose protein product is easily assayed. Such reporter genes include acetohydroxyacid synthase (AHAS), alkaline phosphatase (AP), beta galactosidase (LacZ), beta glucoronidase (GUS), chloramphenicol acetyltransferase (CAT), green fluorescent protein (GFP), horseradish peroxidase (HRP), luciferase (Luc), nopaline synthase (NOS), octopine synthase (OCS), and derivatives thereof. Multiple selectable markers are available that confer resistance to ampicillin, bleomycin, chloramphenicol, gentarnycin, hygromycin, kanamycin, lincomycin, methotrexate, phosphinothricin, puromycin, and tetracyclin. 1. Depending on the assay, quantitation of the amount of gene expression allows one to determine a degree of inhibition which is greater than 10%, 33%, 50%, 90%, 95% or 99% as compared to a cell not treated according to the present invention. Lower doses of injected material and longer times after administration of RNAi agent may result in inhibition in a smaller fraction of cells (e.g., at least 10%, 20%, 50%, 75%, 90%, or 95% of targeted cells). Quantization of gene expression in a cell may show similar amounts of inhibition at the level of accumulation of target mRNA or translation of target protein. As an example, the efficiency of inhibition may be determined by assessing the amount of gene product in the cell; mRNA may be detected with a hybridization probe having a nucleotide sequence outside the region used for the inhibitory double-stranded RNA, or translated polypeptide may be detected with an antibody raised against the polypeptide sequence of that region.

[0595] The RNA may be introduced in an amount which allows delivery of at least one copy per cell. Higher doses (e.g., at least 5, 10, 100, 500 or 1000 copies per cell) of material may yield more effective inhibition; lower doses may also be useful for specific applications.

[0596] In an exemplary aspect, the efficacy of an RNAi agent of the invention (e.g., an siRNA targeting an HTT-1A target sequence) is tested for its ability to specifically degrade mutant mRNA (e.g., HTT-1A mRNA and/or the production of HTT-1A protein) in cells, such as cells in the central nervous system. In certain embodiments, cells in the central nervous system include, but are not limited to, neurons (e.g., striatal or cortical neuronal clonal lines and/or primary neurons), glial cells, and astrocytes. Also, suitable for cell-based validation assays are other readily transfectable cells, for example, HeLa cells or COS cells. Cells are transfected with human wild type or mutant cDNAs (e.g., human wild type or mutant HTT-1A cDNA). Standard siRNA, modified siRNA or vectors able to produce siRNA from U-looped mRNA are co-transfected. Selective reduction in target mRNA (e.g., HTT-1A mRNA) and/or target protein (e.g., HTT-1A protein) is measured. Reduction of target mRNA or protein can be compared to levels of target mRNA or protein in the absence of an RNAi agent or in the presence of an RNAi agent that does not target HTT-1A mRNA. Exogenously-introduced mRNA or protein (or endogenous mRNA or protein) can be assayed for comparison purposes. When utilizing neuronal cells, which are known to be somewhat resistant to standard transfection techniques, it may be desirable to introduce RNAi agents (e.g., siRNAs) by passive uptake.

### Recombinant Adeno-Associated Viruses and Vectors

[0597] In certain exemplary embodiments, recombinant adeno-associated viruses (rAAVs) and their associated vectors can be used to deliver one or more siRNAs into cells, e.g., neural cells (e.g., brain cells). AAV is able to infect many different cell types, although the infection efficiency varies based upon serotype, which is determined by the sequence of the capsid protein. Several native AAV serotypes have been identified, with serotypes 1-9 being the most commonly used for recombinant AAV. AAV-2 is the most well-studied and published serotype. The AAV-DJ system includes serotypes AAV-DJ and AAV-DJ/8. These serotypes were created through DNA shuffling of multiple AAV serotypes to produce AAV with hybrid capsids that have improved transduction efficiencies in vitro (AAV-DJ) and in vivo (AAV-DJ/8) in a variety of cells and tissues.

[0598] In certain embodiments, widespread central nervous system (CNS) delivery can be achieved by intravascular delivery of recombinant adeno-associated virus 7 (rAAV7), RAAV9 and rAAV10, or other suitable rAAVs (Zhang et al. (2011) Mol. Ther. 19(8): 1440-8. doi: 10.1038/mt.2011.98. Epub 2011 May 24). rAAVs and their associated vectors are well-known in the art and are described in US Patent Applications 2014/0296486, 2010/0186103, 2008/0269149, 2006/0078542 and 2005/0220766, each of which is incorporated herein by reference in its entirety for all purposes.

[0599] rAAVs may be delivered to a subject in compositions according to any appropriate methods known in the art. An rAAV can be suspended in a physiologically compatible carrier (i.e., in a composition), and may be administered to a subject, i.e., a host animal, such as a human, mouse, rat, cat, dog, sheep, rabbit, horse, cow, goat, pig, guinea pig, hamster, chicken, turkey, a non-human primate (e.g., Macaque) or the like. In certain embodiments, a host animal is a non-human host animal.

[0600] Delivery of one or more rAAVs to a mammalian subject may be performed, for example, by intramuscular injection or by administration into the bloodstream of the mammalian subject. Administration into the bloodstream may be by injection into a vein, an artery, or any other vascular conduit. In certain embodiments, one or more rAAVs are administered into the bloodstream by way of isolated limb perfusion, a technique well known in the surgical arts, the method essentially enabling the artisan to isolate a limb from the systemic circulation prior to administration of the rAAV virions. A variant of the isolated limb perfusion technique, described in U.S. Pat. No. 6,177,403, can also be employed by the skilled artisan to administer virions into the vasculature of an isolated limb to potentially enhance transduction into muscle cells or tissue. Moreover, in certain instances, it may be desirable to deliver virions to the central nervous system (CNS) of a subject. By “CNS” is meant all cells and tissue of the brain and spinal cord of a vertebrate. Thus, the term includes, but is not limited to, neuronal cells, glial cells, astrocytes, cerebrospinal fluid (CSF), interstitial spaces, bone, cartilage and the like. Recombinant AAVs may be delivered directly to the CNS or brain by injection into, e.g., the ventricular region, as well as to the striatum (e.g., the caudate nucleus or putamen of the striatum), spinal cord and neuromuscular junction, or cerebellar lobule, with a needle, catheter or related device, using neurosurgical techniques known in the art, such as by stereotactic injection (see, e.g., Stein et al., J Virol 73:3424-3429, 1999; Davidson et al., PNAS 97:3428-3432, 2000; Davidson et al., Nat. Genet. 3:219-223, 1993; and Alisky and Davidson, Hum. Gene Ther. 11:2315-2329, 2000).

[0601] The compositions of the invention may comprise an rAAV alone, or in combination with one or more other viruses (e.g., a second rAAV encoding having one or more different transgenes). In certain embodiments, a composition comprises 1, 2, 3, 4, 5, 6, 7, 8, 9, 10 or more different rAAVs each having one or more different transgenes.

[0602] An effective amount of an rAAV is an amount sufficient to target infect an animal, target a desired tissue. In some embodiments, an effective amount of an rAAV is an amount sufficient to produce a stable somatic transgenic animal model. The effective amount will depend primarily on factors such as the species, age, weight, health of the subject, and the tissue to be targeted, and may thus vary among animal and tissue. For example, an effective amount of one or more rAAVs is generally in the range of from about 1 ml to about 100 ml of solution containing from about 10⁹ to 10¹⁶ genome copies. In some cases, a dosage between about 10¹¹ to 10¹² rAAV genome copies is appropriate. In certain embodiments, 10¹² rAAV genome copies is effective to target heart, liver, and pancreas tissues. In some cases, stable transgenic animals are produced by multiple doses of an rAAV.

[0603] In some embodiments, rAAV compositions are formulated to reduce aggregation of AAV particles in the composition, particularly where high rAAV concentrations are present (e.g., about 10¹³ genome copies/mL or more). Methods for reducing aggregation of rAAVs are well known in the art and, include, for example, addition of surfactants, pH adjustment, salt concentration adjustment, etc. (See, e.g., Wright et al. (2005) Molecular Therapy 12:171-178, the contents of which are incorporated herein by reference.)

[0604] “Recombinant AAV (rAAV) vectors” comprise, at a minimum, a transgene and its regulatory sequences, and 5′ and 3′ AAV inverted terminal repeats (ITRs). It is this recombinant AAV vector which is packaged into a capsid protein and delivered to a selected target cell. In some embodiments, the transgene is a nucleic acid sequence, heterologous to the vector sequences, which encodes a polypeptide, protein, functional RNA molecule (e.g., siRNA) or other gene product, of interest. The nucleic acid coding sequence is operatively linked to regulatory components in a manner which permits transgene transcription, translation, and/or expression in a cell of a target tissue.

[0605] The AAV sequences of the vector typically comprise the cis-acting 5′ and 3′ inverted terminal repeat (ITR) sequences (See, e.g., B. J. Carter, in “Handbook of Parvoviruses”, cd., P. Tijsser, CRC Press, pp. 155 168 (1990)). The ITR sequences are usually about 145 basepairs in length. In certain embodiments, substantially the entire sequences encoding the ITRs are used in the molecule, although some degree of minor modification of these sequences is permissible. The ability to modify these ITR sequences is within the skill of the art. (See, e.g., texts such as Sambrook et al, “Molecular Cloning. A Laboratory Manual”, 2d ed., Cold Spring Harbor Laboratory, New York (1989); and K. Fisher et al., J Virol., 70:520 532 (1996)). An example of such a molecule employed in the present invention is a “cis-acting” plasmid containing the transgene, in which the selected transgene sequence and associated regulatory elements are flanked by the 5′ and 3′ AAV ITR sequences. The AAV ITR sequences may be obtained from any known AAV, including mammalian AAV types described further herein.

### VIII. Methods of Treatment

[0606] In one aspect, the present invention provides for both prophylactic and therapeutic methods of treating a subject at risk of (or susceptible to) developing insoluble aggregates in the brain comprising HTT-1A. In one embodiment, the disease or disorder is such that HTT-1A levels in the central nervous system (CNS) have been found to be predictive of neurodegeneration progression. In another embodiment, the disease or disorder is a proteopathy characterized by the aggregation of misfolded proteins. In a certain embodiment, the disease or disorder one in which reduction of HTT-1A in the CNS reduces clinical manifestations seen in neurodegenerative diseases such as Huntington's disease, Alzheimer's disease, Parkinson's disease, or.

[0607] “Treatment,” or “treating,” as used herein, is defined as the application or administration of a therapeutic agent (e.g., a RNA agent or vector or transgene encoding same) to a patient, or application or administration of a therapeutic agent to an isolated tissue or cell line from a patient, who has the disease or disorder, a symptom of disease or disorder or a predisposition toward a disease or disorder, with the purpose to cure, heal, alleviate, relieve, alter, remedy, ameliorate, improve or affect the disease or disorder, the symptoms of the disease or disorder, or the predisposition toward disease.

[0608] In one aspect, the invention provides a method for preventing in a subject, a disease or disorder as described above, by administering to the subject a therapeutic agent (e.g., an RNAi agent or vector or transgene encoding same). Subjects at risk for the disease can be identified by, for example, any or a combination of diagnostic or prognostic assays as described herein. Administration of a prophylactic agent can occur prior to the manifestation of symptoms characteristic of the disease or disorder, such that the disease or disorder is prevented or, alternatively, delayed in its progression.

[0609] Another aspect of the invention pertains to methods treating subjects therapeutically, i.e., alter onset of symptoms of the disease or disorder. In an exemplary embodiment, the modulatory method of the invention involves contacting a CNS cell expressing HTT-1A with a therapeutic agent (e.g., a RNAi agent or vector or transgene encoding same) that is specific for a target sequence within the gene (e.g., HTT-1A target sequences of Tables 18 and 19), such that sequence specific interference with the gene is achieved. These methods can be performed in vitro (e.g., by culturing the cell with the agent) or, alternatively, in vivo (e.g., by administering the agent to a subject).

### IX. Pharmaceutical Compositions and Methods of Administration

[0610] The invention pertains to uses of the above-described agents for prophylactic and/or therapeutic treatments as described infra. Accordingly, the modulators (e.g., RNAi agents) of the present invention can be incorporated into pharmaceutical compositions suitable for administration. Such compositions typically comprise the nucleic acid molecule, protein, antibody, or modulatory compound and a pharmaceutically acceptable carrier. As used herein the language “pharmaceutically acceptable carrier” is intended to include any and all solvents, dispersion media, coatings, antibacterial and antifungal agents, isotonic and absorption delaying agents, and the like, compatible with pharmaceutical administration. The use of such media and agents for pharmaceutically active substances is well known in the art. Except insofar as any conventional media or agent is incompatible with the active compound, use thereof in the compositions is contemplated. Supplementary active compounds can also be incorporated into the compositions.

[0611] A pharmaceutical composition of the invention is formulated to be compatible with its intended route of administration. Examples of routes of administration include parenteral, e.g., intravenous, intradermal, subcutaneous, intraperitoneal, intramuscular, oral (e.g., inhalation), transdermal (topical), and transmucosal administration. In certain exemplary embodiments, the pharmaceutical composition of the invention is administered intravenously and is capable of crossing the blood brain barrier to enter the central nervous system In certain exemplary embodiments, a pharmaceutical composition of the invention is delivered to the cerebrospinal fluid (CSF) by a route of administration that includes, but is not limited to, intrastriatal (IS) administration, intracerebroventricular (ICV) administration and intrathecal (IT) administration (e.g., via a pump, an infusion or the like).

[0612] The nucleic acid molecules of the invention can be inserted into expression constructs, e.g., viral vectors, retroviral vectors, expression cassettes, or plasmid viral vectors, e.g., using methods known in the art, including but not limited to those described in Xia et al., (2002), Supra. Expression constructs can be delivered to a subject by, for example, inhalation, orally, intravenous injection, local administration (see U.S. Pat. No. 5,328,470) or by stereotactic injection (see e.g., Chen et al. (1994), Proc. Natl. Acad. Sci. USA, 91, 3054-3057). The pharmaceutical preparation of the delivery vector can include the vector in an acceptable diluent, or can comprise a slow release matrix in which the delivery vehicle is imbedded. Alternatively, where the complete delivery vector can be produced intact from recombinant cells, e.g., retroviral vectors, the pharmaceutical preparation can include one or more cells which produce the gene delivery system.

[0613] The nucleic acid molecules of the invention can also include small hairpin RNAs (shRNAs), and expression constructs engineered to express shRNAs. Transcription of shRNAs is initiated at a polymerase III (pol III) promoter, and is thought to be terminated at position 2 of a 4-5-thymine transcription termination site. Upon expression, shRNAs are thought to fold into a stem-loop structure with 3′ UU-overhangs; subsequently, the ends of these shRNAs are processed, converting the shRNAs into siRNA-like molecules of about 21 nucleotides. Brummelkamp et al. (2002), Science, 296, 550-553; Lee et al, (2002). supra; Miyagishi and Taira (2002), Nature Biotechnol., 20, 497-500; Paddison et al. (2002), supra; Paul (2002), supra; Sui (2002) supra; Yu et al. (2002), supra.

[0614] The expression constructs may be any construct suitable for use in the appropriate expression system and include, but are not limited to retroviral vectors, linear expression cassettes, plasmids and viral or virally-derived vectors, as known in the art. Such expression constructs may include one or more inducible promoters, RNA Pol III promoter systems such as U6 snRNA promoters or H1 RNA polymerase III promoters, or other promoters known in the art. The constructs can include one or both strands of the siRNA. Expression constructs expressing both strands can also include loop structures linking both strands, or each strand can be separately transcribed from separate promoters within the same construct. Each strand can also be transcribed from a separate expression construct, Tuschl (2002), Supra.

[0615] In certain embodiments, a composition that includes a compound of the invention can be delivered to the nervous system of a subject by a variety of routes. Exemplary routes include intrathecal, parenchymal (e.g., in the brain), nasal, and ocular delivery. The composition can also be delivered systemically, e.g., by intravenous, subcutaneous or intramuscular injection. One route of delivery is directly to the brain, e.g., into the ventricles or the hypothalamus of the brain, or into the lateral or dorsal areas of the brain. The compounds for neural cell delivery can be incorporated into pharmaceutical compositions suitable for administration.

[0616] For example, compositions can include one or more species of a compound of the invention and a pharmaceutically acceptable carrier. The pharmaceutical compositions of the present invention may be administered in a number of ways depending upon whether local or systemic treatment is desired and upon the area to be treated. Administration may be topical (including ophthalmic, intranasal, transdermal), oral or parenteral. Parenteral administration includes intravenous drip, subcutaneous, intraperitoneal or intramuscular injection, intrathecal, or intraventricular (e.g., intracerebroventricular) administration. In certain exemplary embodiments, an RNA silencing agent of the invention is delivered across the Blood-Brain-Barrier (BBB) suing a variety of suitable compositions and methods described herein.

[0617] The route of delivery can be dependent on the disorder of the patient. For example, a subject diagnosed with a neurodegenerative disease can be administered an anti-HTT-1A compounds of the invention directly into the brain (e.g., into the globus pallidus or the corpus striatum of the basal ganglia, and near the medium spiny neurons of the corpus striatum). In addition to a compound of the invention, a patient can be administered a second therapy, e.g., a palliative therapy and/or disease-specific therapy. The secondary therapy can be, for example, symptomatic (e.g., for alleviating symptoms), neuroprotective (e.g., for slowing or halting disease progression), or restorative (e.g., for reversing the disease process). Other therapies can include psychotherapy, physiotherapy, speech therapy, communicative and memory aids, social support services, and dietary advice.

[0618] A compound of the invention can be delivered to neural cells of the brain. In certain embodiments, the compounds of the invention may be delivered to the brain without direct administration to the central nervous system, i.e., the compounds may be delivered intravenously and cross the blood brain barrier to enter the brain. Delivery methods that do not require passage of the composition across the blood-brain barrier can be utilized. For example, a pharmaceutical composition containing a compound of the invention can be delivered to the patient by injection directly into the area containing the disease-affected cells. For example, the pharmaceutical composition can be delivered by injection directly into the brain. The injection can be by stereotactic injection into a particular region of the brain (e.g., the substantia nigra, cortex, hippocampus, striatum, or globus pallidus). The compound can be delivered into multiple regions of the central nervous system (e.g., into multiple regions of the brain, and/or into the spinal cord). The compound can be delivered into diffuse regions of the brain (e.g., diffuse delivery to the cortex of the brain).

[0619] In one embodiment, the compound can be delivered by way of a cannula or other delivery device having one end implanted in a tissue, e.g., the brain, e.g., the substantia nigra, cortex, hippocampus, striatum or globus pallidus of the brain. The cannula can be connected to a reservoir containing the compound. The flow or delivery can be mediated by a pump, e.g., an osmotic pump or minipump, such as an Alzet pump (Durect, Cupertino, CA). In one embodiment, a pump and reservoir are implanted in an area distant from the tissue, e.g., in the abdomen, and delivery is effected by a conduit leading from the pump or reservoir to the site of release. Devices for delivery to the brain are described, for example, in U.S. Pat. Nos. 6,093,180, and 5,814,014.

[0620] It will be readily apparent to those skilled in the art that other suitable modifications and adaptations of the methods described herein may be made using suitable equivalents without departing from the scope of the embodiments disclosed herein. Having now described certain embodiments in detail, the same will be more clearly understood by reference to the following example, which is included for purposes of illustration only and is not intended to be limiting.

### EXAMPLES

### Example 1. In Vitro Identification of HTT-1A Targeting Sequences

[0621] The HTT-1A gene was used as a target for mRNA knockdown. A panel of siRNAs targeting several different sequences of the human and mouse HTT-1A mRNA was developed and screened in Hela cells in vitro and compared to untreated control cells. SiRNAs were designed to target the open reading frame (ORF) and 3′ untranslated region (3′UTR). The siRNAs were each tested at a concentration of 1.5 μM and the mRNA was evaluated with the QuantiGene gene expression assay (ThermoFisher, Waltham, MA) at the 72 hours timepoint. FIG. 1. depicts the results of the screen against human HTT-1A mRNA evaluating forty seven human HTT-1A siRNA's. Six sites were identified that yielded potent and efficacious silencing of HTT-1A mRNA relative to % untreated control. The dose-response curves for four of the six identified siRNA's, oligo ID's 779, 866, 5188 and 6102, are shown in FIG. 2A-2D (P3) and FIG. 2E-2H (P5).

[0622] Table 5 and Table 7 recite the 45mer gene region, and 20 mer target sequence, respectively, of human HTT-1A target sequences that demonstrated reduced HTT-1A mRNA expression relative to percent untreated control. The sense and anti-sense strands of the human HTT-1A siRNA duplexes screened in FIG. 1 are shown in Table 9. Table 10 recites the antisense and sense strands of the six lead human siRNAs that resulted in potent and efficacious silencing of HTT-1A mRNA. The antisense strands contain a 5′ uracil to enhance loading into RISC.

[0623] FIG. 3 is a blot of mouse siRNA's, where numbers 1-18, 20, and 24 marked on the blot correspond to oligo ID numbers 316-636, 646 and 713 in Table 11. FIG. 4 depicts the results of the screen with 24 mouse HTT-1A siRNA's. Table 6 and Table 8 recite the 45mer gene region, and 20 mer target sequence, respectively, of the sequences that yielded the most efficacious silencing. The sense and antisense strands of mouse HTT-1A siRNA duplexes evaluated in the screening assays are listed in Table 11. The sequences of the three mouse siRNA leads are shown in Table 12. The dose response curves of the three leads, oligo ID's 631, 634 and 713, compared to HTT10150, are shown in FIG. 5.

[0624] Table 13-17 lists modified sense and anti-sense strands of HTT mRNA targets sequences recited in additional embodiments.

TABLE 4
Full length human HTT Intron 1 Sequence

| Oligo ID | Sequence |
|---|---|
| HTT- | GTGAGTTTGGGCCCGCTGCAGCTCCCTGTCCCGGC |
| Intron 1 | GGGTCCCAGGCTACGGCGGGGATGGCGGTAACCCT |
| | GCAGCCTGCGGGCCGGCGACACGAACCCCCGGCCC |
| | CGCAGAGACAGAGTGACCCAGCAACCCAGAGCCCA |
| | TGAGGGACACCCGCCCCCTCCTGGGGCGAGGCCTT |
| | CCCCCACTTCAGCCCCGCTCCCTCACTTGGGTCTT |
| | CCCTTGTCCTCTCGCGAGGGGAGGCAGAGCCTTGT |
| | TGGGGCCTGTCCTGAATTCACCGAGGGGAGTCACG |
| | GCCTCAGCCCTCTCGCCCTTCGCAGGATGCGAAGA |
| | GTTGGGGCGAGAACTTGTTTCTTTTTATTTGCGAG |
| | AAACCAGGGGGGGGTTCTTTTAACTGCGTTGTGAA |
| | GAGAACTTGGAGGAGCCGAGATTTGCTCAGTGCCA |
| | CTTCCCTCTTCTAGTCTGAGAGGGAAGAGGGCTGG |
| | GGGCGCGGGACACTTCGAGAGGAGGCGGGGTTTGG |
| | AGCTGGAGAGATGTGGGGGCAGTGGATGACATAAT |
| | GCTTTTAGGACGCCTCGGCGGGAGTGGCGGGGCAG |
| | GGGGGGGGCGGGGAGTGAGGGCGCGTCCAATGGGA |
| | GATTTCTTTTCCTAGTGGCACTTAAAACAGCCTGA |
| | GATTTGAGGCTCTTCCTACATTGTCAGGACATTTC |
| | ATTTAGTTCATGATCACGGTGGTAGTAACACGATT |
| | TTAAGCACCACCTAAGAGATCTGCTCATCTAAGCC |
| | TAAGTTGGTCTGCAGGCGTTTGAATGAGTTGTGGT |
| | TGCCAAGTAAAGTGGTGAACTTACGTGGTGATTAA |
| | TGAAATTATCTTAAATATTAGGAAGAGTTGATTGA |
| | AGTTTTTTGCCTATGTGTGTTGGGAATAAAACCAA |
| | CACGTTGCTGATGGGGAGGTTAATTGCCGAGGGAT |
| | GAATGAGGTGTACATTTTACCAGTATTCCAGTCAG |
| | GCTTGCCAGAATACGGGGGGTCCGCAGACTCCGTG |
| | GGCATCTCAGATGTGCCAGTGAAAGGGTTTCTGTT |
| | TGCTTCATTGCTGACAGCTTGTTACTTTTTGGAAG |
| | CTAGGGGTTTCTGTTGCTTGTTCTTGGGGAGAATT |
| | TTTGAAACAGGAAAAGAGAGACCATTAAAACATCT |
| | AGCGGAACCCCAGGACTTTCCCTGGAAGTCTGTGT |
| | GTCGAGTGTACAGTAGGAGTTAGGAAGTACTCTGG |
| | TGCAGTTCAGGCCTTTCTCTTACCTCTCAGTATTC |
| | TATTTCCGATCTGGATGTGTCCCAGATGGCATTTG |
| | GTAAGAATATCTCTGTTAAGACTGATTAATTTTTA |
| | GTAATATTTCTTGTTCTTTGTTTCTGTTATGATCC |
| | TTGTCTCGTCTTCAAAGTTTAATTAGAAAATGATT |
| | CGGAGAGCAGTGTTAGCTTATTTGTTGGAATAAAA |
| | TTTAGGAATAAATTATTCTAAAGGATGGAAAAACT |
| | TTTTGGATATTTGGAGAAATTTTAAAACAATTTGG |
| | CTTATCTCTTCAGTAAGTAATTTCTCATCCAGAAA |
| | TTTACTGTAGTGCTTTTCTAGGAGGTAGGTGTCAT |
| | AAAAGTTCACACATTGCATGTATCTTGTGTAAACA |
| | CTAAACAGGGCTCCTGATGGGAAGGAAGACCTTTC |
| | TGCTGGGCTGCTTCAGACACTTGATCATTCTAAAA |
| | ATATGCCTTCTCTTTCTTATGCTGATTTGACAGAA |
| | CCTGCATTTGCTTATCTTCAAAATATGGGTATCAA |
| | GAAATTTCCTTTGCTGCCTTGACAAAGGAGATAGA |
| | TTTTGTTTCATTACTTTAAGGTAATATATGATTAC |
| | CTTATTTAAAAAATTTAATCAGGACTGGCAAGGTG |
| | GCTTACACCTTTAATCCGAGCACTTTGGGAGGCCT |
| | AGGTGGACGAATCACCTGAGGTCAGGAGTTTGAGA |
| | CCAGCCTGGCTAACATGGTGAAACCCTGTCTCTAC |
| | TAAAAATACAAAAATTAGCTGGTCATGGTGGCACG |
| | TGCCTGTAATCCAAGCTACCTGGGAGGCTGAGGCA |
| | GGAAAATCGCTTGAACCCGGGAGGCAGAGTCTGCA |
| | GTGAGTTGAGATCACGCCACTGCACTCCAGCCTGG |
| | GTGACAGAGCGAGACTCTATCTCAAAAAAAATTTT |
| | TTTTAATGTATTATTTTTGCATAAGTAATACATTG |
| | ACATGATACAAATTCTGTAATTACAAAAGGGCAAT |
| | AATTAAAATATCTTCCTTCCACCCCTTTCCTCTGA |
| | GTACCTAACTTTGTCCCCAAGAACAAGCACTATTT |
| | CAGTTCCTCATGTATCCTGCCAGATATAACCTGTT |
| | CATATTGTAAGATAGATTTAAAATGCTCTAAAAAC |
| | AAAAGTAGTTTAGAATAATATATATCTATATATTT |
| | TTTGAGATGTAGTCTCACATTGTCACCCAGGCTGG |
| | AGTGCAGTGATACAATCTCGGCTCACTGCAGTCTC |
| | TGCCTCCCAGGTTCAAATGCTTCTCCTGCCTCAGC |
| | CTTCTGAGTAGCTGGGATTACAGGCGCCCACCACC |
| | ATGTCCAGCTAATTTTTGTATTTTTAGTAGAGATG |
| | GGGTTTCACCATGTTGGCCAGGCTGGTCTTGAACT |
| | CCTGACCTTGTGATCTGTCCACCTCGGCCTCCCAA |
| | AGTGCTGGGATTACAGGTGTGAGCCACCATGCCTG |
| | GCTAGAATAATAACTTTTAAAGGTTCTTAGCATGC |
| | TCTGAAATCAACTGCATTAGGTTTATTTATAGTTT |
| | TATAGTTATTTTAAATAAAATGCATATTTGTCATA |
| | TTTCTCTGTATTTTGCTGTTGAGAAAGGAGGTATT |
| | CACTAATTTTGAGTAACAAACACTGCTCACAAAGT |
| | TTGGATTTTGGCAGTTCTGTTCACGTGCTTCAGCC |
| | AAAAAATCCTCTTCTCAAAGTAAGATTGATGAAAG |
| | CAATTTAGAAAGTATCTGTTCTGTTTTTATGGCTC |
| | TTGCTCTTTGGTGTGGAACTGTGGTGTCACGCCAT |
| | GCATGGGCCTCAGTTTATGAGTGTTTGTGCTCTGC |
| | TCAGCATACAGGATGCAGGAGTTCCTTATGGGGCT |
| | GGCTGCAGGCTCAGCAAATCTAGCATGCTTGGGAG |
| | GGTCCTCACAGTAATTAGGAGGCAATTAATACTTG |
| | CTTCTGGCAGTTTCTTATTCTCCTTCAGATTCCTA |
| | TCTGGTGTTTCCCTGACTTTATTCATTCATCAGTA |
| | AATATTTACTAAACATGTACTATGTGCCTGGCACT |
| | GTTATAGGTGCAGGGCTCAGCAGTGAGCAGACAAA |
| | GCTCTGCCCTCGTGAAGCTTTCATTCTAATGAAGG |
| | ACATAGACAGTAAGCAAGATAGATAAGTAAAATAT |
| | ACAGTACGTTAATACGTGGAGGAACTTCAAAGCAG |
| | GGAAGGGGATAGGGAAATGTCAGGGTTAATCGAGT |
| | GTTAACTTATTTTTATTTTTAAAAAAATTGTTAAG |
| | GGCTTTCCAGCAAAACCCAGAAAGCCTGCTAGACA |
| | AATTCCAAAAGAGCTGTAGCACTAAGTGTTGACAT |
| | TTTTATTTTATTTTGTTTTGTTTTGTTTTTTTTGA |
| | GACAGTTCTTGCTCTATCAGCCAGGCTGGAGTGCA |
| | CTAGTGTGATCTTGGCTCACTGCAACCTCTGCCTC |
| | TTGGGTTCAAGTGATTCTCATGCCTCAGCCTCCTG |
| | TTTAGCTGGGATTATAGACATGCACTGCCATGCCT |
| | GGGTAATTTTTTTTTTTTCCCCCGAGACGGAGTCT |
| | TGCTCTGTCGCCCAGGCTGGAGTGCAGTGGCGCGA |
| | TCTCAGCTCACTGCAAGCTCCGCTTCCCGAGTTCA |
| | CGCCATTCTCCTGCCTCAGTCTCCCAAGTAGCTGG |
| | GACTACAGGCGCCTGCCACCACGTCCAGCTAATTT |
| | TTTTGTATTTTTAATAGAGACGGGGTTTCACCGTG |
| | TTAGCCAGGATGATCTTGATCTCCTGACCTCGTCA |
| | TCCGCCGACCTTGTGATCCGCCCACCTCGGCCTCC |
| | CAAAGTGCTGGGATTACAGGCATGAGCCACTGTGC |
| | CCGGCCACGCCTGGGTAATTTTTGTATTTTTAGTA |
| | GAGATGGGGTTTTGCCATGATGAGCAGGCTGGTCT |
| | CGAACTCCCGGCCTCATGTGATCTGCCTGCCTTGG |
| | CCTCCCAAAGTGCTAGGATTACAGGCATGAGCCAC |
| | CATACCTGGCCAGTGTTGATATTTTAAATACGGTG |
| | TTCAGGGAAGGTCCACTGAGAAGACAGCTTTTTTT |
| | TTTTTTTTTTTTGGGGTTGGGGGGCAAGGTCTTGC |
| | TCTTTAACCCAGGCTGGAATGCAGTATCACTA |
| | TCGTAGCTCACTTCAGCCTTGAACTCCTGGGCTCA |
| | AGTGATCCTCCCACCTCAACCTCACAATGTGTTGG |
| | GACTATAGGTGTGAGCCATCACACCTGGCCAGATG |
| | ATGGCTTTTGAGTAAAGACCTCAAGCGAGTTAAGA |
| | GTCTAGTGTAAGGGTGTATGAAGTAGTGGTATTCC |
| | AGATGGGGGGAACAGGTCCAAAATCTTCCTGTTTC |
| | AGGAATAGCAAGGATGTCATTTTAGTTGGGTGAAT |
| | TGAGTGAGGGGGACATTTGTAGTAAGAAGTAAGGT |
| | CCAAGAGGTCAAGGGAGTGCCATATCAGACCAATA |
| | CTACTTGCCTTGTAGATGGAATAAAGATATTGGCA |
| | TTTATGTGAGTGAGATGGGATGTCACTGGAGGATT |
| | AGAGCAGAGGAGTAGCATGATCTGAATTTCAATCT |
| | TAAGTGAACTCTGGCTGACAACAGAGTGAAGGGGA |
| | ACACCGGCAAAAGCAGAAACCAGTTAGGAAGCCAC |
| | TGCAGTGCTCAGATAAGCATGGTGGGTTCTGTCAG |
| | GGTACCGGCTGTCGGCTGTGGGCAGTGTGAGGAAT |
| | GACTGACTGGATTTTGAATGCGGAACCAACTGCAC |
| | TTGTTGAACTCTGCTAAGTATAACAATTTAGCAGT |
| | AGCTTGCGTTATCAGGTTTGTATTCAGCTGCAAGT |
| | AACAGAAAATCCTGCTGCAATAGCTTAAACTGGTA |
| | ACAAGCAAGAGCTTATCAGAAGACAAAAATAAGTC |
| | TGGGGAAATTCAACAATAAGTTAAGGAACCCAGGC |
| | TCTTTCTTTTTTTTTTTTTTGAAACGGAGTTTCGC |
| | TCTTGTCACCCGGGCTGGAGTGCAATGATGTGATC |
| | TCAGCTCACTAAAACCTCTACCTCCTGGGTTCAAG |
| | TGATTCTTCTGCCTCAGCCTCCCAAGTAACTGGGA |
| | TTACAGGCGTATACCACCATGCCCAGCTAATTTTT |
| | GTGTTTTTAGTAGAGATGGGGTTTCACCATGTTGG |
| | CCAGGCTGGTCTCGAACTTCTGACCTCAGGTGATC |
| | CACTCGCCTCAGCCTGCCAAAGTGCTGGGATTACA |
| | GGTTTGGGCCACTGCACCCGGTCAGAACCCAGGCT |
| | CTTTCTTATACTTACCTTGCAAACCCTTGTTCTCA |
| | TTTTTTCCCTTTGTATTTTTATTGTTGAATTGTAA |
| | TAGTTCTTTATATATTCTGGATACTGGATTCTTAT |
| | CAGATAGATGATTTGTAAAAACTCTCCCTTCCTTT |
| | GGATTGTCTTTTTACTTTCTTGATAGTGTCTTTTG |
| | AAGTGTAAAAGTTTTTAATTTTGATGAAGTCGAGT |
| | TTATCTATTTTGTCTTTGGTTGCTGTGCTTCAAGT |
| | GTCATATCTAAGAAATCATTGTCTAATCCAAAGTC |
| | AAAAAGGTTTACTCCTATGTTTTCTTCTAAGAATT |
| | TTAGAGTTTTACATTTAAGTCTGATCCATTTTGAG |
| | TTAATTTTTATATATGGTTCAGGTAGAAGTCCAAC |
| | TTTATTCTTTTCCATGTGGTTATTCAGTTGTCCCA |
| | GCACTGTTTGTTGAAGAGACTATTCTTTCCCCATG |
| | GAATTATCTTAGTACCCTTGTTGAAAATTAATCGT |
| | CCTTAATTGTATAAATTTATTTCTAGACTGTCAGT |
| | TCTACCTGTTGGTCTTTATGTCGATCCTGTGCCAG |
| | TACCATACAGTCTTGATTACTGAAGTTTGTGTCAC |
| | AGTTTAAATTCATGAAATGTGAGTTCTCCAACTTT |
| | GTTCCTTTTCAAGATTGATTTGGCCATGCTGGGTC |
| | CCTTGCATTTCCGTACGAATTGTAGGATCAGCTTG |
| | TCAGTTTCAACAAAGAAGCCAAGTAGGATTCTGAG |
| | AGGGATTGTGTTGAATCTGTAGATCAACTTGGGGA |
| | GTATTCGCATCTTAACAATATTGTCTTCCACCTAT |
| | GAACATGGGCAAACTTTGTGTAAATGGTCAGATTG |
| | TAAGTATTTCGGGCTGTGTGGGCACAGTGTCTCTG |
| | TCACAGCTACGCGGCTCTGCCATTGTAGCATGAAA |
| | GTAGCCATAAGCAATATGTATGAGTGTCTGTGTTC |
| | CAATAGAATTTTATTAATGACAAGGAAGTTTGAAT |
| | TTCATATAATTTTCACCTGTCATGAGATAGTATTT |
| | GATTATTTTGGTCAACCATTTAAAAATGTAAAAAC |
| | ATTTCTTAGCTTGTGAACTAGCCAAAAATATGCAG |
| | GTTATAGTTTTCCCACTCCTAGGTTAAAATATGAT |
| | AGGACCACATTTGGAAAGCATTTCTTTTTTTTTTT |
| | TTTTTTTTTTTTTTGAGACGGAGTTTCACTCTTGT |
| | TGCCCAGGCTGGAGTGCAGTGGCGCGATCTCGGCT |
| | CACTGCAACCTCTGCCTCCCAGGTTCAAGACA |
| | TTCTCCTGCACGGCCTCCCTAGTAGCTGGGATTAC |
| | AGGCATGCGCCACCACACCCAGCTAATTTTGTATT |
| | TTTAGTAGAGACGGGGTTTCTCCATGTTGGTCAGG |
| | CTGGTCTTGAACTCCTGACCTCAGGTGATCCACCC |
| | GCCTCAGCCTCCCAAAGTGCTGGGATTACAGGGTG |
| | TGAGCCACCACACCCTGCTGGAAAGCATTTCTTTT |
| | TTGGCTGTTTTTGTTTTTTTTTTAAACTAGTTTTG |
| | AAAATTATAAAAGTTACACATATACATTATAAAAA |
| | TATCTTCAAGCAGCACAGATGAAAAACAAAGCCCT |
| | TCTTGCAAGTCTGTCATCTTTGTCTAACTTCCTAA |
| | GAACAAAAGTGTTTCTTGTGTCTTCTTCCCAGATT |
| | TTAATATGCATATACAAGCATTTAAATGTGTCATT |
| | TTTTGTTTGCTTGACTGAGATCACATTACATATGT |
| | ATTTTTTTACTTAACAATGTGTCATAGATATTGTT |
| | CCATAGCAGTACCTGTAATTCTTATTAATTGCTAT |
| | GTAATATTTTAGAATTTCTTTTTAAAAGAGGACTT |
| | TTGGAGATGTAAAGGCAAAGGTCTCACATTTTTGT |
| | GGCTGTAGAATGTGCTGGTGACATATTCTCTCTAC |
| | CTTGAGAAGTCCCCATCCCCATCACCTCCATTTCC |
| | TGTAAATAAGTCAACCACTTGATAAACTACCTTTG |
| | AATGGATCCACACTCAAAACATTTAGTCTTATTCA |
| | GACAACAAGGAGGAAAAATAAA |
| | (SEQ ID NO: 35) |

TABLE 5
Human HTT-1A mRNA 45-nucleotide
target sequences

| Oligo ID | 45mer Gene Region |
|---|---|
| HTT_int1_ | CCUACAUUGUCAGGACAUUUCAUUU |
| 779 | AGUUCAUGAUCACGGUGGUA |
| | (SEQ ID NO: 36) |
| HTT_int1_ | AGCCUAAGUUGGUCUGCAGGCGUUU |
| 866 | GAAUGAGUUGUGGUUGCCAA |
| | (SEQ ID NO: 37) |
| HTT_int1_ | GGAGUGCAAUGAUGUGAUCUCAGCU |
| 5188 | CACUAAAACCUCUACCUCCU |
| | (SEQ ID NO: 38) |
| HTT_int1_ | UGGCCAUGCUGGGUCCCUUGCAUUU |
| 6102 | CCGUACGAAUUGUAGGAUCA |
| | (SEQ ID NO: 39) |
| HTT_int1_ | UGUAUGAGUGUCUGUGUUCCAAUAG |
| 6378 | AAUUUUAUUAAUGACAAGGA |
| | (SEQ ID NO: 40) |
| HTT_int1_ | UGAGAAGUCCCCAUCCCCAUCACCU |
| 7341 | CCAUUUCCUGUAAAUAAGUC |
| | (SEQ ID NO: 41) |

TABLE 6
Mouse HTT-1A mRNA 45-nucleotide
target sequences

| Oligo ID | 45mer Gene Region |
|---|---|
| HTT_int1_ | CGUUUCAUUUAGUUUGUGGU |
| 631 | GUAGUGUAGUUAAACCAGGU |
| | (SEQ ID NO: 42) |
| HTT_int1_ | UUCAUUUAGUUUGUGGUGUA |
| 634 | GUGUAGUUAAACCAGGUUUU |
| | (SEQ ID NO: 43) |
| HTT_int1_ | CAGUUGGAUGAGUUGUAUUU |
| 713 | GUCAAGUACAUGGUGAGUUA |
| | (SEQ ID NO: 44) |

TABLE 7
Human HTT-1A mRNA 20 mer target sequences

| Oligo ID | 20mer target sequence |
|---|---|
| HTT_int1_779 | CAUUUCAUUUAGUUCAUGAU |
| | (SEQ ID NO: 45) |
| HTT_int1_866 | GCAGGCGUUUGAAUGAGUUG |
| | (SEQ ID NO: 46) |
| HTT_int1_5188 | GAUCUCAGCUCACUAAAACC |
| | (SEQ ID NO: 47) |
| HTT_int1_6102 | CCUUGCAUUUCCGUACGAAU |
| | (SEQ ID NO: 48) |
| HTT_int1_6378 | GUUCCAAUAGAAUUUUAUUA |
| | (SEQ ID NO: 49) |
| HTT_int1_7341 | CCCAUCACCUCCAUUUCCUG |
| | (SEQ ID NO: 50) |

TABLE 8
Mouse HTT-1A mRNA 20 mer target sequences

| Oligo ID | 20mer target sequence |
|---|---|
| HTT_int1_631 | GUGGUGUAGUGUAGUUAAAC |
| | (SEQ ID NO: 51) |
| HTT_int1_634 | GUGUAGUGUAGUUAAACCAG |
| | (SEQ ID NO: 52) |
| HTT_int1_713 | UAUUUGUCAAGUACAUGGUG |
| | (SEQ ID NO: 53) |

TABLE 9
Human HTT-1A siRNA sequences, used
for the screens depicted in FIG. 1.

| | Antisense Sequence | Sense Sequence |
|---|---|---|
| Oligo ID | (5′-3′) | (5′-3′) |
| HTT_int1_ | UCGGUGAAUUCAGGACAG | GCCUGUCCUGAAUUCACCGA |
| 369 | GC (SEQ ID NO: 54) | (SEQ ID NO: 102) |
| HTT_int1_ | UAGAAGAGGGAAGUGGCA | AGUGCCACUUCCCUCUUCUA |
| 534 | CU (SEQ ID NO: 55) | (SEQ ID NO: 103) |
| HTT_int1_ | UUGACAAUGUAGGAAGAG | GGCUCUUCCUACAUUGUCAG |
| 757 | CC (SEQ ID NO: 56) | (SEQ ID NO: 104) |
| HTT_int1_ | UUCCUGACAAUGUAGGAA | UCUUCCUACAUUGUCAGGAC |
| 760 | GA (SEQ ID NO: 57) | (SEQ ID NO: 105) |
| HTT_int1_ | UAACUAAAUGAAAUGUCC | CAGGACAUUUCAUUUAGUUC |
| 774 | UG (SEQ ID NO: 58) | (SEQ ID NO: 106) |
| HTT_int1_ | UUCAUGAACUAAAUGAAA | CAUUUCAUUUAGUUCAUGAU |
| 779 | UG (SEQ ID NO: 59) | (SEQ ID NO: 45) |
| HTT_int1_ | UAACUCAUUCAAACGCCU | GCAGGCGUUUGAAUGAGUUG |
| 866 | GC (SEQ ID NO: 60) | (SEQ ID NO: 46) |
| HTT_int1_ | UCUGGCACAUCUGAGAUG | GGCAUCUCAGAUGUGCCAGU |
| 1100 | CC (SEQ ID NO: 61) | (SEQ ID NO: 107) |
| HTT_int1_ | UCACUGGCACAUCUGAGA | CAUCUCAGAUGUGCCAGUGA |
| 1102 | UG (SEQ ID NO: 62) | (SEQ ID NO: 108) |
| HTT_int1_ | UAGAACAAGCAACAGAAA | GGUUUCUGUUGCUUGUUCUU |
| 1175 | CC (SEQ ID NO: 63) | (SEQ ID NO: 109) |
| HTT_int1_ | UAAAUGCCAUCUGGGACA | UGUGUCCCAGAUGGCAUUUG |
| 1654 | CA (SEQ ID NO: 64) | (SEQ ID NO: 26) |
| HTT_int1_ | UAGACGAGACAAGGAUCA | UAUGAUCCUUGUCUCGUCUU |
| 1442 | UA (SEQ ID NO: 65) | (SEQ ID NO: 110) |
| HTT_int1_ | UACAAGAUACAUGCAAUG | CACAUUGCAUGUAUCUUGUG |
| 1669 | UG (SEQ ID NO: 66) | (SEQ ID NO: 111) |
| HTT_int1_ | UUCAGCAUAAGAAAGAGA | CUUCUCUUUCUUAUGCUGAU |
| 1771 | AG (SEQ ID NO: 67) | (SEQ ID NO: 112) |
| HTT_int1_ | UAGCAAAUGCAGGUUCUG | GACAGAACCUGCAUUUGCUU |
| 1793 | UC (SEQ ID NO: 68) | (SEQ ID NO: 113) |
| HTT_int1_ | UAAGAUAAGCAAAUGCAG | ACCUGCAUUUGCUUAUCUUC |
| 1799 | GU (SEQ ID NO: 69) | (SEQ ID NO: 114) |
| HTT_int1_ | UUAAUGAAACAAAAUCUA | GAUAGAUUUUGUUUCAUUAC |
| 1864 | UC (SEQ ID NO: 70) | (SEQ ID NO: 115) |
| HTT_int1_ | UUCGGAUUAAAGGUGUAA | GCUUACACCUUUAAUCCGAG |
| 1940 | GC (SEQ ID NO: 71) | (SEQ ID NO: 116) |
| HTT_int1_ | UAGUAGAGACAGGGUUUC | GUGAAACCCUGUCUCUACUA |
| 2027 | AC (SEQ ID NO: 72) | (SEQ ID NO: 117) |
| HTT_int1_ | UUUAGUAGAGACAGGGUU | GAAACCCUGUCUCUACUAAA |
| 2029 | UC (SEQ ID NO: 73) | (SEQ ID NO: 118) |
| HTT_int1_ | UCCCGGGUUCAAGCGAUU | AAAAUCGCUUGAACCCGGGA |
| 2117 | UU (SEQ ID NO: 74) | (SEQ ID NO: 119) |
| HTT_int1_ | UAGUGGCGUGAUCUCAAC | GAGUUGAGAUCACGCCACUG |
| 2152 | UC (SEQ ID NO: 75) | (SEQ ID NO: 120) |
| HTT_int1_ | UGAUAGAGUCUCGCUCUG | GACAGAGCGAGACUCUAUCU |
| 2187 | UC (SEQ ID NO: 76) | (SEQ ID NO: 121) |
| HTT_int1_ | UCUGGCCAACAUGGUGAA | GUUUCACCAUGUUGGCCAGG |
| 2642 | AC (SEQ ID NO: 77) | (SEQ ID NO: 122) |
| HTT_int1_ | UAGUUGAUUUCAGAGCAU | GCAUGCUCUGAAAUCAACUG |
| 2774 | GC (SEQ ID NO: 78) | (SEQ ID NO: 123) |
| HTT_int1_ | UGGCUGAAGCACGUGAAC | CUGUUCACGUGCUUCAGCCA |
| 2936 | AG (SEQ ID NO: 79) | (SEQ ID NO: 124) |
| HTT_int1_ | UUCCACACCAAAGAGCAA | UCUUGCUCUUUGGUGUGGAA |
| 3023 | GA (SEQ ID NO: 80) | (SEQ ID NO: 125) |
| HTT_int1_ | UUCCUAAUUACUGUGAGG | GUCCUCACAGUAAUUAGGAG |
| 3166 | AC (SEQ ID NO: 81) | (SEQ ID NO: 126) |
| HTT_int1_ | UCAGGGAAACACCAGAUA | CCUAUCUGGUGUUUCCCUGA |
| 3231 | GG (SEQ ID NO: 82) | (SEQ ID NO: 127) |
| HTT_int1_ | UCCUGCUUUGAAGUUCCU | GGAGGAACUUCAAAGCAGGG |
| 3427 | CC (SEQ ID NO: 83) | (SEQ ID NO: 128) |
| HTT_int1_ | UUAAGUUAACACUUGAUU | UUAAUCAAGUGUUAACUUAU |
| 3470 | AA (SEQ ID NO: 84) | (SEQ ID NO: 129) |
| HTT_int1_ | UCAAGAUCACACUAGUGC | GUGCACUAGUGUGAUCUUGG |
| 3650 | AC (SEQ ID NO: 85) | (SEQ ID NO: 130) |
| HTT_int1_ | UCUGGCUAACACGGUGAA | GUUUCACCGUGUUAGCCAGG |
| 3959 | AC (SEQ ID NO: 86) | (SEQ ID NO: 131) |
| HTT_int1_ | UCCUGGGUUAAAGAGCAA | UCUUGCUCUUUAACCCAGGC |
| 4314 | GA (SEQ ID NO: 87) | (SEQ ID NO: 132) |
| HTT_int1_ | UUCUUAACUCGCUUGAGG | GACCUCAAGCGAGUUAAGAG |
| 4473 | UC (SEQ ID NO: 88) | (SEQ ID NO: 133) |
| HTT_int1_ | UCUAAUCCUCCAGUGACA | GAUGUCACUGGAGGAUUAGA |
| 4720 | UC (SEQ ID NO: 89) | (SEQ ID NO: 134) |
| HTT_int1_ | UAACAAGUGCAGUUGGUU | GGAACCAACUGCACUUGUUG |
| 4933 | CC (SEQ ID NO: 90) | (SEQ ID NO: 135) |
| HTT_int1_ | UUGAAUACAAACCUGAUA | GUUAUCAGGUUUGUAUUCAG |
| 4989 | AC (SEQ ID NO: 91) | (SEQ ID NO: 136) |
| HTT_int1_ | UGUUUUAGUGAGCUGAGA | GAUCUCAGCUCACUAAAACC |
| 5188 | UC (SEQ ID NO: 92) | (SEQ ID NO: 47) |
| HTT_int1_ | UAAGGUAAGUAUAAGAAA | UCUUUCUUAUACUUACCUUG |
| 5436 | GA (SEQ ID NO: 93) | (SEQ ID NO: 137) |
| HTT_int1_ | UCAAUGAUUUCUUAGAUA | CAUAUCUAAGAAAUCAUUGU |
| 5684 | UG (SEQ ID NO: 94) | (SEQ ID NO: 138) |
| HTT_int1_ | UAGAAAACAUAGGAGUAA | GUUUACUCCUAUGUUUUCUU |
| 5723 | AC (SEQ ID NO: 95) | (SEQ ID NO: 139) |
| HTT_int1_ | UCUGGGACAACUGAAUAA | GGUUAUUCAGUUGUCCCAGC |
| 5839 | CC (SEQ ID NO: 96) | (SEQ ID NO: 140) |
| HTT_int1_ | UCGGAAAUGCAAGGGACC | UGGGUCCCUUGCAUUUCCGU |
| 6096 | CA (SEQ ID NO: 97) | (SEQ ID NO: 141) |
| HTT_int1_ | UUUCGUACGGAAAUGCAA | CCUUGCAUUUCCGUACGAAU |
| 6102 | GG (SEQ ID NO: 98) | (SEQ ID NO: 48) |
| HTT_int1_ | UAAUAAAAUUCUAUUGGA | GUUCCAAUAGAAUUUUAUUA |
| 6378 | AC (SEQ ID NO: 99) | (SEQ ID NO: 49) |
| HTT_int1_ | UAGGAAAUGGAGGUGAUG | CCCAUCACCUCCAUUUCCUG |
| 7341 | GG (SEQ ID NO: 100) | (SEQ ID NO: 50) |
| HTT_int1_ | UCUCUAACAUACAUUCUA | GCUAGAAUGUAUGUUAGAGA |
| 7502 | GC (SEQ ID NO: 101) | (SEQ ID NO: 142) |

TABLE 10
Human HTT-1A siRNA sequences, used for dose-
response assays depicted in FIG. 2.

| | Antisense Sequence | Sense Sequence |
|---|---|---|
| Oligo ID | (5′-3′) | (5′-3′) |
| HTT_int1_ | UUCAUGAACUAAAUGAAAUG | CAUUUAGUUCAUGAA |
| 779 | (SEQ ID NO: 59) | (SEQ ID NO: 143) |
| HTT_int1_ | UAACUCAUUCAAACGCCUGC | CGUUUGAAUGAGUUA |
| 866 | (SEQ ID NO: 60) | (SEQ ID NO: 144) |
| HTT_int1_ | UGUUUUAGUGAGCUGAGAUC | CAGCUCACUAAAACA |
| 5188 | (SEQ ID NO: 92) | (SEQ ID NO: 145) |
| HTT_int1_ | UUUCGUACGGAAAUGCAAGG | CAUUUCCGUACGAAA |
| 6102 | (SEQ ID NO: 98) | (SEQ ID NO: 146) |
| HTT_int1_ | UAAUAAAAUUCUAUUGGAAC | AAUAGAAUUUUAUUA |
| 6378 | (SEQ ID NO: 99) | (SEQ ID NO: 147) |
| HTT_int1_ | UAGGAAAUGGAGGUGAUGGG | CACCUCCAUUUCCUA |
| 7341 | (SEQ ID NO: 100) | (SEQ ID NO: 148) |

TABLE 11
Mouse HTT-1A siRNA sequences, used for the screens depicted in FIG. 4.

| | Antisense Sequence | Sense Sequence |
|---|---|---|
| Oligo ID | (5′-3′) | (5′-3′) |
| HTTintron1_316 | UUCCCUAACUUCGCAAACUG | UGCGAAGUUAGGGAA |
| | (SEQ ID NO: 149) | (SEQ ID NO: 173) |
| HTTintron1_324 | UAAGUUCGUUCCCUAACUUC | UAGGGAACGAACUUA |
| | (SEQ ID NO: 150) | (SEQ ID NO: 174) |
| HTTintron1_325 | UCAAGUUCGUUCCCUAACUU | AGGGAACGAACUUGA |
| | (SEQ ID NO: 151) | (SEQ ID NO: 175) |
| HTTintron1_342 | UUCUCCAGAAGAGAGAAACA | CUCUCUUCUGGAGAA |
| | (SEQ ID NO: 152) | (SEQ ID NO: 176) |
| HTTintron1_348 | UCCAGUUUCUCCAGAAGAGA | UCUGGAGAAACUGGA |
| | (SEQ ID NO: 153) | (SEQ ID NO: 177) |
| HTTintron1_385 | UCCAAGUUCUCUUCACAACA | UGAAGAGAACUUGGA |
| | (SEQ ID NO: 154) | (SEQ ID NO: 178) |
| HTTintron1_416 | UUGAGGAGGUAACCCUAGAG | GGGUUACCUCCUCAA |
| | (SEQ ID NO: 155) | (SEQ ID NO: 179) |
| HTTintron1_477 | UUAUGUCAUCCACUACCCGC | UAGUGGAUGACAUAA |
| | (SEQ ID NO: 156) | (SEQ ID NO: 180) |
| HTTintron1_478 | UUUAUGUCAUCCACUACCCG | AGUGGAUGACAUAAA |
| | (SEQ ID NO: 157) | (SEQ ID NO: 181) |
| HTTintron1_486 | UUAAAAGCAUUAUGUCAUCC | ACAUAAUGCUUUUAA |
| | (SEQ ID NO: 158) | (SEQ ID NO: 182) |
| HTTintron1_538 | UCCAUUGGAUGCGUUCACAC | AACGCAUCCAAUGGA |
| | (SEQ ID NO: 159) | (SEQ ID NO: 183) |
| HTTintron1_577 | UUCACAGGCUGCUUCAAGUG | GAAGCAGCCUGUGAA |
| | (SEQ ID NO: 160) | (SEQ ID NO: 184) |
| HTTintron1_614 | UCUAAAUGAAACGCCAGGAG | GGCGUUUCAUUUAGA |
| | (SEQ ID NO: 161) | (SEQ ID NO: 185) |
| HTTintron1_619 | UACAAACUAAAUGAAACGCC | UUCAUUUAGUUUGUA |
| | (SEQ ID NO: 162) | (SEQ ID NO: 186) |
| HTTintron1_631 | UCUACACUACACCACAAACU | GUGGUGUAGUGUAGA |
| | (SEQ ID NO: 163) | (SEQ ID NO: 187) |
| HTTintron1_634 | UUAACUACACUACACCACAA | GUGUAGUGUAGUUAA |
| | (SEQ ID NO: 164) | (SEQ ID NO: 188) |
| HTTintron1_635 | UUUAACUACACUACACCACA | UGUAGUGUAGUUAAA |
| | (SEQ ID NO: 165) | (SEQ ID NO: 189) |
| HTTintron1_636 | UUUUAACUACACUACACCAC | GUAGUGUAGUUAAAA |
| | (SEQ ID NO: 166) | (SEQ ID NO: 190) |
| HTTintron1_643 | UAACCUGGUUUAACUACACU | AGUUAAACCAGGUUA |
| | (SEQ ID NO: 167) | (SEQ ID NO: 191) |
| HTTintron1_646 | UUAAAACCUGGUUUAACUAC | UAAACCAGGUUUUAA |
| | (SEQ ID NO: 168) | (SEQ ID NO: 192) |
| HTTintron1_647 | UUUAAAACCUGGUUUAACUA | AAACCAGGUUUUAAA |
| | (SEQ ID NO: 169) | (SEQ ID NO: 193) |
| HTTintron1_664 | UCACCUCUCUGGCUAUGCUU | UAGCCAGAGAGGUGA |
| | (SEQ ID NO: 170) | (SEQ ID NO: 194) |
| HTTintron1_696 | UCUCAUCCAACUGCCUGCAG | GGCAGUUGGAUGAGA |
| | (SEQ ID NO: 171) | (SEQ ID NO: 195) |
| HTTintron1_713 | UGUACUUGACAAAUACAACU | UAUUUGUCAAGUACA |
| | (SEQ ID NO: 172) | (SEQ ID NO: 196) |

TABLE 12
Lead mouse HTT-1A siRNA sequences, used for
dose-response assays depicted in FIG. 5.

| | Antisense Sequence | Sense Sequence |
|---|---|---|
| Oligo ID | (5′-3′) | (5′-3′) |
| HTTintron1_ | UCUACACUAC | GUGGUGUA |
| 631 | ACCACAAACU | GUGUAGA |
| | (SEQ ID | (SEQ ID |
| | NO: 163) | NO: 187) |
| HTTintron1_ | UUAACUACAC | GUGUAGUG |
| 634 | UACACCACAA | UAGUUAA |
| | (SEQ ID | (SEQ ID |
| | NO: 164) | NO: 188) |
| HTTintron1_ | UGUACUUGAC | UAUUUGU |
| 713 | AAAUACAACU | CAAGUACA |
| | (SEQ ID | (SEQ ID |
| | NO: 172) | NO: 196) |

TABLE 13
Modified HTT mRNA targets sequences, sense and antisense strands,
additional embodiments.

| OLIGO | |
|---|---|
| ID | Modified Sequence |
| HTT_15 | P(mU)#(fU)#(mC)(fA)(mU)(fC)(mA)(fG)(mC)(fU)(mU)(fU)(mU)#(fC)#(mC)# |
| 2-as | (fA)#(mG)#(fG)#(mG)#(fU) (SEQ ID NO: 197) |
| HTT_17 | P(mU)#(fU)#(mG)(fA)(mG)(fG)(mG)(fA)(mC)(fU)(mC)(fG)(mA)#(fA)#(mG) |
| 0-as | #(fG)#(mC)#(fC)#(mU)#(fU) (SEQ ID NO: 198) |
| HTT_21 | P(mU)#(fC)#(mU)(fG)(mC)(fU)(mG)(fC)(mU)(fG)(mC)(fU)(mG)#(fC)#(mU)# |
| 1-as | (fG)#(mC)#(fU)#(mG)#(fC) (SEQ ID NO: 199) |
| HTT_40 | P(mU)#(fU)#(mU)(fC)(mU)(fU)(mU)(fG)(mG)(fU)(mC)(fG)(mG)#(fU)#(mG) |
| 2-as | #(fC)#(mA)#(fG)#(mC)#(fG) (SEQ ID NO: 200) |
| HTT_42 | P(mU)#(fU)#(mU)(fG)(mG)(fU)(mA)(fG)(mC)(fU)(mG)(fA)(mA)#(fA)#(mG) |
| 0-as | #(fU)#(mU)#(fC)#(mU)#(fU) (SEQ ID NO: 201) |
| HTT_43 | P(mU)#(fA)#(mC)(fG)(mG)(fU)(mC)(fU)(mU)(fU)(mC)(fU)(mU)#(fG)#(mG) |
| 0-as | #(fU)#(mA)#(fG)#(mC)#(fU) (SEQ ID NO: 202) |
| HTT_44 | P(mU)#(fU)#(mC)(fA)(mG)(fA)(mC)(fA)(mA)(fU)(mG)(fA)(mU)#(fU)#(mC) |
| 6-as | #(fA)#(mC)#(fA)#(mC)#(fG) (SEQ ID NO: 203) |
| HTT_45 | P(mU)#(fA)#(mC)(fA)(mU)(fA)(mU)(fU)(mG)(fU)(mC)(fA)(mG)#(fA)#(mC) |
| 4-as | #(fA)#(mA)#(fU)#(mG)#(fA) (SEQ ID NO: 204) |
| HTT_46 | P(mU)#(fA)#(mU)(fG)(mU)(fU)(mU)(fU)(mC)(fA)(mC)(fA)(mU)#(fA)#(mU) |
| 2-as | #(fU)#(mG)#(fU)#(mC)#(fA) (SEQ ID NO: 205) |
| HTT_46 | P(mU)#(fC)#(mC)(fA)(mC)(fU)(mA)(fU)(mG)(fU)(mU)(fU)(mU)#(fC)#(mA) |
| 7-as | #(fC)#(mA)#(fU)#(mA)#(fU) (SEQ ID NO: 206) |
| HTT 15 | (fG)#(mG)#(fA)(mA)(fA)(mA)(fG)(mC)(fU)(mG)(fA)(mU)(fG)#(mA)#(fA)- |
| 2-s | TegChol (SEQ ID NO: 207) |
| HTT_17 | (fC)#(mU)#(fU)(mC)(fG)(mA)(fG)(mU)(fC)(mC)(fC)(mU)(fC)#(mA)#(fA)- |
| 0-s | TegChol (SEQ ID NO: 208) |
| HTT_21 | (fA)#(mG)#(fC)(mA)(fG)(mC)(fA)(mG)(fC)(mA)(fG)(mC)(fA)#(mG)#(fA)- |
| 1-s | TegChol (SEQ ID NO: 209) |
| HTT_40 | (fC)#(mA)#(fC)(mC)(fG)(mA)(fC)(mC)(fA)(mA)(fA)(mG)(fA)#(mA)#(fA)- |
| 2-s | TegChol (SEQ ID NO: 210) |
| HTT_42 | (fC)#(mU)#(fU)(mU)(fC)(mA)(fG)(mC)(fU)(mA)(fC)(mC)(fA)#(mA)#(fA)- |
| 0-s | TegChol (SEQ ID NO: 211) |
| HTT_43 | (fC)#(mC)#(fA)(mA)(fG)(mA)(fA)(mA)(fG)(mA)(fC)(mC)(fG)#(mU)#(fA)- |
| 0-s | TegChol (SEQ ID NO: 212) |
| HTT_44 | (fG)#(mA)#(fA)(mU)(fC)(mA)(fU)(mU)(fG)(mU)(fC)(mU)(fG)#(mA)#(fA)- |
| 6-s | TegChol (SEQ ID NO: 213) |
| HTT_45 | (fG)#(mU)#(fC)(mU)(fG)(mA)(fC)(mA)(fA)(mU)(fA)(mU)(fG)#(mU)#(fA)- |
| 4-s | TegChol (SEQ ID NO: 214) |
| HTT_46 | (fA)#(mU)#(fA)(mU)(fG)(mU)(fG)(mA)(fA)(mA)(fA)(mC)(fA)#(mU)#(fA)- |
| 2-s | TegChol (SEQ ID NO: 215) |
| HTT_46 | (fU)#(mG)#(fA)(mA)(fA)(mA)(fC)(mA)(fU)(mA)(fG)(mU)(fG)#(mG)#(fA)- |
| 7-s | TegChol (SEQ ID NO: 216) |

“f” corresponds to a nucleotide with a 2′-fluoro modification; “m” corresponds to a nucleotide with a 2′-O-methyl modification; “#” corresponds to a phosphorothioate internucleotide linkage; “P” corresponds to a 5′ phosphate; “TegChol” corresponds to a cholesterol moiety conjugated via a triethylene glycol linker

TABLE 14
Modified HTT intron 1 mRNA targets sequences, sense and antisense strands,
additional embodiments.

| OLIGO ID | Modified Sequence |
|---|---|
| HTTintron1_ | P(mU)#(fA)#(mA)(fG)(mU)(fU)(mC)(fG)(mU)(fU)(mC)(fC)(mC)#(fU)# |
| 324_as | (mA)#(fA)#(mC)#(fU)#(mU)#(fC) (SEQ ID NO: 217) |
| HTTintron1_ | P(mU)#(fC)#(mA)(fA)(mG)(fU)(mU)(fC)(mG)(fU)(mU)(fC)(mC)#(fC)#( |
| 325_as | mU)#(fA)#(mA)#(fC)#(mU)#(fU) (SEQ ID NO: 218) |
| HTTintron1_ | P(mU)#(fU)#(mC)(fU)(mC)(fC)(mA)(fG)(mA)(fA)(mG)(fA)(mG)#(fA)# |
| 342_as | (mG)#(fA)#(mA)#(fA)#(mC)#(fA) (SEQ ID NO: 219) |
| HTTintron1_ | P(mU)#(fC)#(mC)(fA)(mG)(fU)(mU)(fU)(mC)(fU)(mC)(fC)(mA)#(fG)#( |
| 348_as | mA)#(fA)#(mG)#(fA)#(mG)#(fA) (SEQ ID NO: 220) |
| HTTintron1_ | P(mU)#(fC)#(mC)(fA)(mA)(fG)(mU)(fU)(mC)(fU)(mC)(fU)(mU)#(fC)#( |
| 385_as | mA)#(fC)#(mA)#(fA)#(mC)#(fA) (SEQ ID NO: 221) |
| HTTintron1_ | P(mU)#(fU)#(mG)(fA)(mG)(fG)(mA)(fG)(mG)(fU)(mA)(fA)(mC)#(fC)# |
| 416_as | (mC)#(fU)#(mA)#(fG)#(mA)#(fG) (SEQ ID NO: 222) |
| HTTintron1_ | P(mU)#(fU)#(mA)(fU)(mG)(fU)(mC)(fA)(mU)(fC)(mC)(fA)(mC)#(fU)# |
| 477_as | (mA)#(fC)#(mC)#(fC)#(mG)#(fC) (SEQ ID NO: 223) |
| HTTintron1_ | P(mU)#(fU)#(mU)(fA)(mU)(fG)(mU)(fC)(mA)(fU)(mC)(fC)(mA)#(fC)# |
| 478_as | (mU)#(fA)#(mC)#(fC)#(mC)#(fG) (SEQ ID NO: 224) |
| HTTintron1_ | P(mU)#(fU)#(mA)(fA)(mA)(fA)(mG)(fC)(mA)(fU)(mU)(fA)(mU)#(fG)# |
| 486_as | (mU)#(fC)#(mA)#(fU)#(mC)#(fC) (SEQ ID NO: 225) |
| HTTintron1_ | P(mU)#(fC)#(mC)(fA)(mU)(fU)(mG)(fG)(mA)(fU)(mG)(fC)(mG)#(fU)# |
| 538_as | (mU)#(fC)#(mA)#(fC)#(mA)#(fC) (SEQ ID NO: 226) |
| HTTintron1_ | P(mU)#(fU)#(mC)(fA)(mC)(fA)(mG)(fG)(mC)(fU)(mG)(fC)(mU)#(fU)# |
| 577_as | (mC)#(fA)#(mA)#(fG)#(mU)#(fG) (SEQ ID NO: 227) |
| HTTintron1_ | P(mU)#(fC)#(mU)(fA)(mA)(fA)(mU)(fG)(mA)(fA)(mA)(fC)(mG)#(fC)# |
| 614_as | (mC)#(fA)#(mG)#(fG)#(mA)#(fG) (SEQ ID NO: 228) |
| HTTintron1_ | P(mU)#(fA)#(mC)(fA)(mA)(fA)(mC)(fU)(mA)(fA)(mA)(fU)(mG)#(fA)# |
| 619_as | (mA)#(fA)#(mC)#(fG)#(mC)#(fC) (SEQ ID NO: 229) |
| HTTintron1_ | P(mU)#(fC)#(mU)(fA)(mC)(fA)(mC)(fU)(mA)(fC)(mA)(fC)(mC)#(fA)#( |
| 631_as | mC)#(fA)#(mA)#(fA)#(mC)#(fU) (SEQ ID NO: 230) |
| HTTintron1_ | P(mU)#(fU)#(mA)(fA)(mC)(fU)(mA)(fC)(mA)(fC)(mU)(fA)(mC)#(fA)# |
| 634_as | (mC)#(fC)#(mA)#(fC)#(mA)#(fA) (SEQ ID NO: 231) |
| HTTintron1_ | P(mU)#(fU)#(mU)(fA)(mA)(fC)(mU)(fA)(mC)(fA)(mC)(fU)(mA)#(fC)# |
| 635_as | (mA)#(fC)#(mC)#(fA)#(mC)#(fA) (SEQ ID NO: 232) |
| HTTintron1_ | P(mU)#(fU)#(mU)(fU)(mA)(fA)(mC)(fU)(mA)(fC)(mA)(fC)(mU)#(fA)# |
| 636 as | (mC)#(fA)#(mC)#(fC)#(mA)#(fC) (SEQ ID NO: 233) |
| HTTintron1_ | P(mU)#(fA)#(mA)(fC)(mC)(fU)(mG)(fG)(mU)(fU)(mU)(fA)(mA)#(fC)# |
| 643_as | (mU)#(fA)#(mC)#(fA)#(mC)#(fU) (SEQ ID NO: 234) |
| HTTintron1_ | P(mU)#(fU)#(mA)(fA)(mA)(fA)(mC)(fC)(mU)(fG)(mG)(fU)(mU)#(fU)# |
| 646_as | (mA)#(fA)#(mC)#(fU)#(mA)#(fC) (SEQ ID NO: 235) |
| HTTintron1_ | P(mU)#(fU)#(mU)(fA)(mA)(fA)(mA)(fC)(mC)(fU)(mG)(fG)(mU)#(fU)# |
| 647_as | (mU)#(fA)#(mA)#(fC)#(mU)#(fA) (SEQ ID NO: 236) |
| HTTintron1_ | P(mU)#(fC)#(mA)(fC)(mC)(fU)(mC)(fU)(mC)(fU)(mG)(fG)(mC)#(fU)#( |
| 664_as | mA)#(fU)#(mG)#(fC)#(mU)#(fU) (SEQ ID NO: 237) |
| HTTintron1_ | P(mU)#(fC)#(mU)(fC)(mA)(fU)(mC)(fC)(mA)(fA)(mC)(fU)(mG)#(fC)#( |
| 696_as | mC)#(fU)#(mG)#(fC)#(mA)#(fG) (SEQ ID NO: 238) |
| HTTintron1_ | P(mU)#(fG)#(mU)(fA)(mC)(fU)(mU)(fG)(mA)(fC)(mA)(fA)(mA)#(fU)# |
| 713_as | (mA)#(fC)#(mA)#(fA)#(mC)#(fU) (SEQ ID NO: 239) |
| HTTintron1_ | (fU)#(mG)#(fC)(mG)(fA)(mA)(fG)(mU)(fU)(mA)(fG)(mG)(fG)#(mA)#(f |
| 316_s | A)-TegChol (SEQ ID NO: 240) |
| HTTintron1_ | (fU)#(mA)#(fG)(mG)(fG)(mA)(fA)(mC)(fG)(mA)(fA)(mC)(fU)#(mU)#(f |
| 324_s | A)-TegChol (SEQ ID NO: 241) |
| HTTintron1_ | (fA)#(mG)#(fG)(mG)(fA)(mA)(fC)(mG)(fA)(mA)(fC)(mU)(fU)#(mG)#(f |
| 325_s | A)-TegChol (SEQ ID NO: 242) |
| HTTintron1_ | (fC)#(mU)#(fC)(mU)(fC)(mU)(fU)(mC)(fU)(mG)(fG)(mA)(fG)#(mA)#(f |
| 342_s | A)-TegChol (SEQ ID NO: 243) |
| HTTintron1_ | (fU)#(mC)#(fU)(mG)(fG)(mA)(fG)(mA)(fA)(mA)(fC)(mU)(fG)#(mG)#(f |
| 348_s | A)-TegChol (SEQ ID NO: 244) |
| HTTintron1_ | (fU)#(mG)#(fA)(mA)(fG)(mA)(fG)(mA)(fA)(mC)(fU)(mU)(fG)#(mG)#(f |
| 385_s | A)-TegChol (SEQ ID NO: 245) |
| HTTintron1_ | (fG)#(mG)#(fG)(mU)(fU)(mA)(fC)(mC)(fU)(mC)(fC)(mU)(fC)#(mA)#(f |
| 416_s | A)-TegChol (SEQ ID NO: 246) |
| HTTintron1_ | (fU)#(mA)#(fG)(mU)(fG)(mG)(fA)(mU)(fG)(mA)(fC)(mA)(fU)#(mA)#(f |
| 477_s | A)-TegChol (SEQ ID NO: 247) |
| HTTintron1_ | (fA)#(mG)#(fU)(mG)(fG)(mA)(fU)(mG)(fA)(mC)(fA)(mU)(fA)#(mA)#(f |
| 478_s | A)-TegChol (SEQ ID NO: 248) |
| HTTintron1_ | (fA)#(mC)#(fA)(mU)(fA)(mA)(fU)(mG)(fC)(mU)(fU)(mU)(fU)#(mA)#(f |
| 486_s | A)-TegChol (SEQ ID NO: 249) |
| HTTintron1_ | (fA)#(mA)#(fC)(mG)(fC)(mA)(fU)(mC)(fC)(mA)(fA)(mU)(fG)#(mG)#(f |
| 538_s | A)-TegChol (SEQ ID NO: 250) |
| HTTintron1_ | (fG)#(mA)#(fA)(mG)(fC)(mA)(fG)(mC)(fC)(mU)(fG)(mU)(fG)#(mA)#(f |
| 577_s | A)-TegChol (SEQ ID NO: 251) |
| HTTintron1_ | (fG)#(mG)#(fC)(mG)(fU)(mU)(fU)(mC)(fA)(mU)(fU)(mU)(fA)#(mG)#(f |
| 614_s | A)-TegChol (SEQ ID NO: 252) |
| HTTintron1_ | (fU)#(mU)#(fC)(mA)(fU)(mU)(fU)(mA)(fG)(mU)(fU)(mU)(fG)#(mU)#(f |
| 619_s | A)-TegChol (SEQ ID NO: 253) |
| HTTintron1_ | (fG)#(mU)#(fG)(mG)(fU)(mG)(fU)(mA)(fG)(mU)(fG)(mU)(fA)#(mG)#( |
| 631_s | fA)-TegChol (SEQ ID NO: 254) |
| HTTintron1_ | (fG)#(mU)#(fG)(mU)(fA)(mG)(fU)(mG)(fU)(mA)(fG)(mU)(fU)#(mA)#( |
| 634_s_ | fA)-TegChol (SEQ ID NO: 255) |
| HTTintron1_ | (fU)#(mG)#(fU)(mA)(fG)(mU)(fG)(mU)(fA)(mG)(fU)(mU)(fA)#(mA)#( |
| 635_s | fA)-TegChol (SEQ ID NO: 256) |
| HTTintron1_ | (fG)#(mU)#(fA)(mG)(fU)(mG)(fU)(mA)(fG)(mU)(fU)(mA)(fA)#(mA)#( |
| 636_s | fA)-TegChol (SEQ ID NO: 257) |
| HTTintron1_ | (fA)#(mG)#(fU)(mU)(fA)(mA)(fA)(mC)(fC)(mA)(fG)(mG)(fU)#(mU)#(f |
| 643_s | A)-TegChol (SEQ ID NO: 258) |
| HTTintron1_ | (fU)#(mA)#(fA)(mA)(fC)(mC)(fA)(mG)(fG)(mU)(fU)(mU)(fU)#(mA)#(f |
| 646_s | A)-TegChol (SEQ ID NO: 259) |
| HTTintron1_ | (fA)#(mA)#(fA)(mC)(fC)(mA)(fG)(mG)(fU)(mU)(fU)(mU)(fA)#(mA)#(f |
| 647_s | A)-TegChol (SEQ ID NO: 260) |
| HTTintron1_ | (fU)#(mA)#(fG)(mC)(fC)(mA)(fG)(mA)(fG)(mA)(fG)(mG)(fU)#(mG)#(f |
| 664_s | A)-TegChol (SEQ ID NO: 261) |
| HTTintron1_ | (fG)#(mG)#(fC)(mA)(fG)(mU)(fU)(mG)(fG)(mA)(fU)(mG)(fA)#(mG)#(f |
| 696_s | A)-TegChol (SEQ ID NO: 262) |
| HTTintron1_ | (fU)#(mA)#(fU)(mU)(fU)(mG)(fU)(mC)(fA)(mA)(fG)(mU)(fA)#(mC)#(f |
| 713_s | A)-TegChol (SEQ ID NO: 263) |

“f” corresponds to a nucleotide with a 2′-fluoro modification; “m” corresponds to a nucleotide with a 2′-O-methyl modification; “#” corresponds to a phosphorothioate internucleotide linkage; “P” corresponds to a 5′ phosphate; “TegChol” corresponds to a cholesterol moiety conjugated via a triethylene glycol linker

TABLE 15
Modified HTT exon 1 mRNA target sequences, sense and antisense strands,
additional embodiments.

| OLIGO ID | Modified Sequence |
|---|---|
| HTT_148_ | P(mU)#(fC)#(mA)(fG)(mC)(fU)(mU)(fU)(mU)(fC)(mC)(fA)(mG)#(fG)#( |
| exon1_as | mG)#(fU)#(mC)#(fG)#(mC)#(fC) (SEQ ID NO: 264) |
| HTT_150_ | P(mU)#(fA)#(mU)(fC)(mA)(fG)(mC)(fU)(mU)(fU)(mU)(fC)(mC)#(fA)#( |
| exon1_as | mG)#(fG)#(mG)#(fU)#(mC)#(fG) (SEQ ID NO: 265) |
| HTT_153_ | P(mU)#(fU)#(mU)(fC)(mA)(fU)(mC)(fA)(mG)(fC)(mU)(fU)(mU)#(fU)#( |
| exon1 as | mC)#(fC)#(mA)#(fG)#(mG)#(fG) (SEQ ID NO: 266) |
| HTT_155_ | P(mU)#(fC)#(mC)(fU)(mU)(fC)(mA)(fU)(mC)(fA)(mG)(fC)(mU)#(fU)#( |
| exon1_as | mU)#(fU)#(mC)#(fC)#(mA)#(fG) (SEQ ID NO: 267) |
| HTT_157_ | P(mU)#(fG)#(mG)(fC)(mC)(fU)(mU)(fC)(mA)(fU)(mC)(fA)(mG)#(fC)#( |
| exon1_as | mU)#(fU)#(mU)#(fU)#(mC)#(fC) (SEQ ID NO: 268) |
| HTT 163_ | P(mU)#(fC)#(mU)(fC)(mG)(fA)(mA)(fG)(mG)(fC)(mC)(fU)(mU)#(fC)#( |
| exon1_as | mA)#(fU)#(mC)#(fA)#(mG)#(fC) (SEQ ID NO: 269) |
| HTT_165_ | P(mU)#(fG)#(mA)(fC)(mU)(fC)(mG)(fA)(mA)(fG)(mG)(fC)(mC)#(fU)#( |
| exon1_as | mU)#(fC)#(mA)#(fU)#(mC)#(fA) (SEQ ID NO: 270) |
| HTT_171_ | P(mU)#(fU)#(mU)(fG)(mA)(fG)(mG)(fG)(mA)(fC)(mU)(fC)(mG)#(fA)#( |
| exon1_as | mA)#(fG)#(mG)#(fC)#(mC)#(fU) (SEQ ID NO: 271) |
| HTT_173_ | P(mU)#(fA)#(mC)(fU)(mU)(fG)(mA)(fG)(mG)(fG)(mA)(fC)(mU)#(fC)#( |
| exon1_as | mG)#(fA)#(mA)#(fG)#(mG)#(fC) (SEQ ID NO: 272) |
| HTT_175_ | P(mU)#(fG)#(mG)(fA)(mC)(fU)(mU)(fG)(mA)(fG)(mG)(fG)(mA)#(fC)#( |
| exon1_as | mU)#(fC)#(mG)#(fA)#(mA)#(fG) (SEQ ID NO: 273) |
| HTT_177_ | P(mU)#(fA)#(mA)(fG)(mG)(fA)(mC)(fU)(mU)(fG)(mA)(fG)(mG)#(fG)#( |
| exon1_as | mA)#(fC)#(mU)#(fC)#(mG)#(fA) (SEQ ID NO: 274) |
| HTT_179_ | P(mU)#(fG)#(mG)(fA)(mA)(fG)(mG)(fA)(mC)(fU)(mU)(fG)(mA)#(fG)#( |
| exon1_as | mG)#(fG)#(mA)#(fC)#(mU)#(fC) (SEQ ID NO: 275) |
| HTT_182_ | P(mU)#(fG)#(mC)(fU)(mG)(fG)(mA)(fA)(mG)(fG)(mA)(fC)(mU)#(fU)#( |
| exon1_as | mG)#(fA)#(mG)#(fG)#(mG)#(fA) (SEQ ID NO: 276) |
| HTT_252_ | P(mU)#(fG)#(mG)(fC)(mG)(fG)(mC)(fU)(mG)(fU)(mU)(fG)(mC)#(fU)#( |
| exon1_as | mG)#(fC)#(mU)#(fG)#(mC)#(fU) (SEQ ID NO: 277) |
| HTT_255_ | P(mU)#(fG)#(mG)(fU)(mG)(fG)(mC)(fG)(mG)(fC)(mU)(fG)(mU)#(fU)#( |
| exon1_as | mG)#(fC)#(mU)#(fG)#(mC)#(fU) (SEQ ID NO: 278) |
| HTT_291_ | P(mU)#(fU)#(mG)(fA)(mG)(fG)(mA)(fA)(mG)(fC)(mU)(fG)(mA)#(fG)#( |
| exon1_as | mG)#(fA)#(mG)#(fG)#(mC)#(fG) (SEQ ID NO: 279) |
| HTT_293_ | P(mU)#(fG)#(mC)(fU)(mG)(fA)(mG)(fG)(mA)(fA)(mG)(fC)(mU)#(fG)#( |
| exon1_as | mA)#(fG)#(mG)#(fA)#(mG)#(fG) (SEQ ID NO: 280) |
| HTT_295_ | P(mU)#(fC)#(mG)(fG)(mC)(fU)(mG)(fA)(mG)(fG)(mA)(fA)(mG)#(fC)#( |
| exon1_as | mU)#(fG)#(mA)#(fG)#(mG)#(fA) (SEQ ID NO: 281) |
| HTT_323_ | P(mU)#(fG)#(mA)(fG)(mG)(fC)(mA)(fG)(mC)(fA)(mG)(fC)(mG)#(fG)#( |
| exon1_as | mC)#(fU)#(mG)#(fU)#(mG)#(fC) (SEQ ID NO: 282) |
| HTT_386_ | P(mU)#(fG)#(mC)(fG)(mG)(fC)(mU)(fC)(mC)(fU)(mC)(fA)(mG)#(fC)#( |
| exon1_as | mC)#(fA)#(mC)#(fA)#(mG)#(fC) (SEQ ID NO: 283) |
| HTT_390_ | P(mU)#(fU)#(mG)(fC)(mA)(fG)(mC)(fG)(mG)(fC)(mU)(fC)(mC)#(fU)#( |
| exon1_as | mC)#(fA)#(mG)#(fC)#(mC)#(fA) (SEQ ID NO: 284) |
| HTT_394 | P(mU)#(fU)#(mC)(fG)(mG)(fU)(mG)(fC)(mA)(fG)(mC)(fG)(mG)#(fC)#( |
| exon1_as | mU)#(fC)#(mC)#(fU)#(mC)#(fA) (SEQ ID NO: 285) |
| HTT_397_ | P(mU)#(fU)#(mG)(fG)(mU)(fC)(mG)(fG)(mU)(fG)(mC)(fA)(mG)#(fC)#( |
| exon1_as | mG)#(fG)#(mC)#(fU)#(mC)#(fC) (SEQ ID NO: 286) |
| HTT_146_ | (fG)#(mA)#(fC)(mC)(fC)(mU)(fG)(mG)(fA)(mA)(fA)(mA)(fG)#(mC)#(f |
| exon1_s | A)-TegChol (SEQ ID NO: 287) |
| HTT_148_ | (fC)#(mC)#(fC)(mU)(fG)(mG)(fA)(mA)(fA)(mA)(fG)(mC)(fU)#(mG)#(f |
| exon1_s | A)-TegChol (SEQ ID NO: 288) |
| HTT_150_ | (fC)#(mU)#(fG)(mG)(fA)(mA)(fA)(mA)(fG)(mC)(fU)(mG)(fA)#(mU)#(f |
| exon1_s | A)-TegChol (SEQ ID NO: 289) |
| HTT_153_ | (fG)#(mA)#(fA)(mA)(fA)(mG)(fC)(mU)(fG)(mA)(fU)(mG)(fA)#(mA)#(f |
| exon1_s | A)-TegChol (SEQ ID NO: 290) |
| HTT_155_ | (fA)#(mA)#(fA)(mG)(fC)(mU)(fG)(mA)(fU)(mG)(fA)(mA)(fG)#(mG)#(f |
| exon1_s | A)-TegChol (SEQ ID NO: 291) |
| HTT_157_ | (fA)#(mG)#(fC)(mU)(fG)(mA)(fU)(mG)(fA)(mA)(fG)(mG)(fC)#(mC)#(f |
| exon1_s | A)-TegChol (SEQ ID NO: 292) |
| HTT_163_ | (fU)#(mG)#(fA)(mA)(fG)(mG)(fC)(mC)(fU)(mU)(fC)(mG)(fA)#(mG)#(f |
| exon1_s | A)-TegChol (SEQ ID NO: 293) |
| HTT_165_ | (fA)#(mA)#(fG)(mG)(fC)(mC)(fU)(mU)(fC)(mG)(fA)(mG)(fU)#(mC)#(f |
| exon1_s | A)-TegChol (SEQ ID NO: 294) |
| HTT_171_ | (fU)#(mU)#(fC)(mG)(fA)(mG)(fU)(mC)(fC)(mC)(fU)(mC)(fA)#(mA)#(f |
| exon1_s | A)-TegChol (SEQ ID NO: 295) |
| HTT_173_ | (fC)#(mG)#(fA)(mG)(fU)(mC)(fC)(mC)(fU)(mC)(fA)(mA)(fG)#(mU)#(f |
| exon1_s | A)-TegChol (SEQ ID NO: 296) |
| HTT_175_ | (fA)#(mG)#(fU)(mC)(fC)(mC)(fU)(mC)(fA)(mA)(fG)(mU)(fC)#(mC)#(f |
| exon1_s | A)-TegChol (SEQ ID NO: 297) |
| HTT_177_ | (fU)#(mC)#(fC)(mC)(fU)(mC)(fA)(mA)(fG)(mU)(fC)(mC)(fU)#(mU)#(f |
| exon1_s | A)-TegChol (SEQ ID NO: 298) |
| HTT_179_ | (fC)#(mC)#(fU)(mC)(fA)(mA)(fG)(mU)(fC)(mC)(fU)(mU)(fC)#(mC)#(f |
| exon1_s | A)-TegChol (SEQ ID NO: 299) |
| HTT_182_ | (fC)#(mA)#(fA)(mG)(fU)(mC)(fC)(mU)(fU)(mC)(fC)(mA)(fG)#(mC)#(f |
| exon1_s | A)-TegChol (SEQ ID NO: 300) |
| HTT_252_ | (fC)#(mA)#(fG)(mC)(fA)(mA)(fC)(mA)(fG)(mC)(fC)(mG)(fC)#(mC)#(f |
| exon1_s | A)-TegChol (SEQ ID NO: 301) |
| HTT_255_ | (fC)#(mA)#(fA)(mC)(fA)(mG)(fC)(mC)(fG)(mC)(fC)(mA)(fC)#(mC)#(f |
| exon1_s | A)-TegChol (SEQ ID NO: 302) |
| HTT_291_ | (fC)#(mC)#(fU)(mC)(fA)(mG)(fC)(mU)(fU)(mC)(fC)(mU)(fC)#(mA)#(f |
| exon1_s | A)-TegChol (SEQ ID NO: 303) |
| HTT_293_ | (fU)#(mC)#(fA)(mG)(fC)(mU)(fU)(mC)(fC)(mU)(fC)(mA)(fG)#(mC)#(f |
| exon1_s | A)-TegChol (SEQ ID NO: 304) |
| HTT_295_ | (fA)#(mG)#(fC)(mU)(fU)(mC)(fC)(mU)(fC)(mA)(fG)(mC)(fC)#(mG)#(f |
| exon1_s | A)-TegChol (SEQ ID NO: 305) |
| HTT_323_ | (fG)#(mC)#(fC)(mG)(fC)(mU)(fG)(mC)(fU)(mG)(fC)(mC)(fU)#(mC)#(f |
| exon1_s | A)-TegChol (SEQ ID NO: 306) |
| HTT_386_ | (fG)#(mG)#(fC)(mU)(fG)(mA)(fG)(mG)(fA)(mG)(fC)(mC)(fG)#(mC)#(f |
| exon1_s | A)-TegChol (SEQ ID NO: 307) |
| HTT_390_ | (fG)#(mA)#(fG)(mG)(fA)(mG)(fC)(mC)(fG)(mC)(fU)(mG)(fC)#(mA)#(f |
| exon1_s | A)-TegChol (SEQ ID NO: 308) |
| HTT_394_ | (fA)#(mG)#(fC)(mC)(fG)(mC)(fU)(mG)(fC)(mA)(fC)(mC)(fG)#(mA)#(f |
| exon1_s | A)-TegChol (SEQ ID NO: 309) |
| HTT_397_ | (fC)#(mG)#(fC)(mU)(fG)(mC)(fA)(mC)(fC)(mG)(fA)(mC)(fC)#(mA)#(f |
| exon1_s | A)-TegChol (SEQ ID NO: 310) |

“f” corresponds to a nucleotide with a 2′-fluoro modification; “m” corresponds to a nucleotide with a 2′-O-methyl modification; “#” corresponds to a phosphorothioate internucleotide linkage; “P” corresponds to a 5′ phosphate; “TegChol” corresponds to a cholesterol moiety conjugated via a triethylene glycol linker

TABLE 16
Modified 3′UTR HTT mRNA targets sequences, sense and antisense strands,
additional embodiments.

| OLIGO ID | Modified Sequence |
|---|---|
| 3′UTR_HTT_ | P(mU)#(fU)#(mU)(fA)(mC)(fA)(mC)(fG)(mG)(fG)(mC)(fA)(mU)#(fA) |
| 10182_as | #(mG)#(fA)#(mA)#(fA)#(mG)#(fA) (SEQ ID NO: 311) |
| 3′UTR_HTT_ | P(mU)#(fU)#(mA)(fC)(mU)(fU)(mU)(fA)(mC)(fA)(mC)(fG)(mG)#(fG) |
| 10186_as | #(mC)#(fA)#(mU)#(fA)#(mG)#(fA) (SEQ ID NO: 312) |
| 3′UTR_HTT_ | P(mU)#(fG)#(mC)(fA)(mC)(fU)(mC)(fU)(mC)(fC)(mU)(fG)(mA)#(fC)# |
| 10809_as | (mU)#(fA)#(mA)#(fA)#(mA)#(fG) (SEQ ID NO: 313) |
| 3′UTR_HTT_ | P(mU)#(fA)#(mC)(fA)(mU)(fU)(mC)(fA)(mA)(fU)(mA)(fC)(mC)#(fC) |
| 11116_as | #(mA)#(fA)#(mA)#(fA)#(mC)#(fA) (SEQ ID NO: 314) |
| 3′UTR_HTT_ | P(mU)#(fU)#(mC)(fC)(mU)(fC)(mC)(fA)(mC)(fU)(mU)(fA)(mC)#(fC)# |
| 11129_as | (mA)#(fC)#(mA)#(fU)#(mU)#(fC) (SEQ ID NO: 315) |
| 3′UTR_HTT_ | P(mU)#(fA)#(mC)(fA)(mU)(fU)(mU)(fC)(mC)(fU)(mC)(fC)(mA)#(fC)# |
| 11134_as | (mU)#(fU)#(mA)#(fC)#(mC)#(fA) (SEQ ID NO: 316) |
| 3′UTR_HTT_ | P(mU)#(fG)#(mC)(fA)(mC)(fA)(mG)(fA)(mG)(fU)(mU)(fC)(mC)#(fA) |
| 11147_as | #(mA)#(fC)#(mA)#(fU)#(mU)#(fU) (SEQ ID NO: 317) |
| 3′UTR_HTT_ | P(mU)#(fU)#(mA)(fA)(mG)(fG)(mG)(fC)(mC)(fU)(mC)(fC)(mU)#(fC) |
| 11412_as | #(mA)#(fA)#(mA)#(fC)#(mA)#(fU) (SEQ ID NO: 318) |
| 3′UTR_HTT_ | P(mU)#(fU)#(mC)(fA)(mG)(fU)(mA)(fG)(mC)(fU)(mU)(fC)(mC)#(fC) |
| 11426_as | #(mU)#(fU)#(mA)#(fA)#(mG)#(fG) (SEQ ID NO: 319) |
| 3′UTR_HTT_ | P(mU)#(fU)#(mU)(fC)(mU)(fU)(mA)(fC)(mG)(fU)(mG)(fU)(mU)#(fA) |
| 11443_as | #(mU)#(fA)#(mA)#(fU)#(mU)#(fC) (SEQ ID NO: 320) |
| 3′UTR_HTT_ | P(mU)#(fU)#(mU)(fC)(mU)(fU)(mA)(fC)(mA)(fA)(mA)(fU)(mG)#(fU) |
| 11659_as | #(mA)#(fA)#(mA)#(fC)#(mA)#(fU) (SEQ ID NO: 321) |
| 3′UTR_HTT_ | P(mU)#(fG)#(mU)(fG)(mU)(fU)(mA)(fU)(mU)(fU)(mC)(fU)(mU)#(fA) |
| 11666_as | #(mC)#(fA)#(mA)#(fA)#(mU)#(fG) (SEQ ID NO: 322) |
| 3′UTR_HTT_ | P(mU)#(fU)#(mU)(fA)(mC)(fA)(mU)(fU)(mC)(fA)(mC)(fA)(mG)#(fU) |
| 11677_as | #(mG)#(fU)#(mU)#(fA)#(mU)#(fU) (SEQ ID NO: 323) |
| 3′UTR_HTT_ | P(mU)#(fU)#(mU)(fA)(mC)(fU)(mA)(fA)(mU)(fG)(mA)(fG)(mC)#(fU) |
| 11863_as | #(mC)#(fA)#(mU)#(fA)#(mU)#(fU) (SEQ ID NO: 324) |
| 3′UTR_HTT_ | P(mU)#(fU)#(mA)(fU)(mG)(fU)(mA)(fU)(mA)(fU)(mG)(fC)(mG)#(fU) |
| 11890_as | #(mG)#(fG)#(mG)#(fU)#(mG)#(fA) (SEQ ID NO: 325) |
| 3′UTR_HTT_ | P(mU)#(fA)#(mU)(fU)(mA)(fU)(mA)(fG)(mA)(fU)(mG)(fU)(mG)#(fU) |
| 11927_as | #(mC)#(fU)#(mA)#(fU)#(mA)#(fU) (SEQ ID NO: 326) |
| 3′UTR_HTT_ | P(mU)#(fU)#(mU)(fG)(mA)(fG)(mA)(fG)(mG)(fU)(mG)(fU)(mG)#(fU) |
| 11947_as | #(mG)#(fU)#(mG)#(fU)#(mA)#(fA) (SEQ ID NO: 327) |
| 3′UTR_HTT_ | P(mU)#(fU)#(mU)(fA)(mG)(fG)(mA)(fA)(mC)(fA)(mU)(fG)(mA)#(fU) |
| 12163_as | #(mA)#(fA)#(mA)#(fG)#(mU)#(fC) (SEQ ID NO: 328) |
| 3′UTR_HTT_ | P(mU)#(fU)#(mU)(fA)(mA)(fU)(mC)(fA)(mC)(fA)(mU)(fU)(mU)#(fG) |
| 12218_as | #(mC)#(fA)#(mA)#(fC)#(mA)#(fA) (SEQ ID NO: 329) |
| 3′UTR_HTT_ | P(mU)#(fC)#(mC)(fA)(mA)(fA)(mU)(fU)(mA)(fA)(mU)(fC)(mA)#(fC) |
| 12223_as | #(mA)#(fU)#(mU)#(fU)#(mG)#(fC) (SEQ ID NO: 330) |
| 3′UTR_HTT_ | P(mU)#(fA)#(mA)(fA)(mA)(fC)(mU)(fU)(mG)(fA)(mC)(fA)(mA)#(fC) |
| 12235_as | #(mC)#(fA)#(mA)#(fA)#(mU)#(fU) (SEQ ID NO: 331) |
| 3′UTR_HTT_ | P(mU)#(fU)#(mU)(fA)(mC)(fC)(mA)(fG)(mC)(fA)(mG)(fG)(mA)#(fA) |
| 12279_as | #(mA)#(fA)#(mC)#(fA)#(mA)#(fA) (SEQ ID NO: 332) |
| 3′UTR_HTT_ | P(mU)#(fA)#(mU)(fA)(mU)(fU)(mA)(fC)(mC)(fA)(mG)(fC)(mA)#(fG) |
| 12282_as | #(mG)#(fA)#(mA)#(fA)#(mA)#(fC) (SEQ ID NO: 333) |
| 3′UTR_HTT_ | P(mU)#(fU)#(mU)(fA)(mA)(fA)(mA)(fU)(mC)(fU)(mU)(fU)(mC)#(fC) |
| 12297_as | #(mC)#(fG)#(mA)#(fU)#(mA)#(fU) (SEQ ID NO: 334) |
| 3′UTR_HTT_ | P(mU)#(fA)#(mC)(fC)(mC)(fU)(mG)(fG)(mU)(fU)(mU)(fC)(mA)#(fU) |
| 12309_as | #(mU)#(fA)#(mA)#(fA)#(mA)#(fU) (SEQ ID NO: 335) |
| 3′UTR_HTT_ | P(mU)#(fU)#(mU)(fC)(mU)(fA)(mC)(fC)(mC)(fU)(mG)(fG)(mU)#(fU) |
| 12313_as | #(mU)#(fC)#(mA)#(fU)#(mU)#(fA) (SEQ ID NO: 336) |
| 3′UTR_HTT_ | P(mU)#(fC)#(mA)(fG)(mU)(fG)(mC)(fA)(mU)(fU)(mG)(fC)(mC)#(fA) |
| 12331_as | #(mA)#(fA)#(mC)#(fA)#(mA)#(fU) (SEQ ID NO: 337) |
| 3′UTR_HTT_ | P(mU)#(fC)#(mU)(fU)(mA)(fG)(mA)(fA)(mA)(fC)(mA)(fA)(mC)#(fU) |
| 13136_as | #(mG)#(fA)#(mG)#(fG)#(mG)#(fG) (SEQ ID NO: 338) |
| 3′UTR_HTT_ | P(mU)#(fA)#(mU)(fA)(mC)(fA)(mU)(fC)(mU)(fC)(mU)(fC)(mG)#(fU) |
| 13398_as | #(mC)#(fA)#(mG)#(fU)#(mC)#(fC) (SEQ ID NO: 339) |
| 3′UTR_HTT_ | P(mU)#(fU)#(mA)(fA)(mA)(fU)(mA)(fU)(mA)(fC)(mA)(fU)(mC)#(fU) |
| 13403_as | #(mC)#(fU)#(mC)#(fG)#(mU)#(fC) (SEQ ID NO: 340) |
| 3′UTR_HTT_ | P(mU)#(fG)#(mU)(fU)(mU)(fG)(mC)(fA)(mG)(fC)(mA)(fG)(mU)#(fU) |
| 13423_as | #(mA)#(fA)#(mA)#(fA)#(mA)#(fA) (SEQ ID NO: 341) |
| 3′UTR_HTT_ | P(mU)#(fA)#(mC)(fA)(mA)(fU)(mG)(fU)(mU)(fU)(mG)(fC)(mA)#(fG) |
| 13428_as | #(mC)#(fA)#(mG)#(fU)#(mU)#(fA) (SEQ ID NO: 342) |
| 3′UTR_HTT_ | (fA)#(mA)#(fC)(mG)(fU)(mA)(fA)(mC)(fU)(mC)(fU)(mU)(fU)#(mC)# |
| 10169_s | (fA)-TegChol (SEQ ID NO: 343) |
| 3′UTR_HTT_ | (fC)#(mU)#(fA)(mU)(fG)(mC)(fC)(mC)(fG)(mU)(fG)(mU)(fA)#(mA)# |
| 10182_s | (fA)-TegChol (SEQ ID NO: 344) |
| 3′UTR_HTT_ | (fG)#(mC)#(fC)(mC)(fG)(mU)(fG)(mU)(fA)(mA)(fA)(mG)(fU)#(mA)# |
| 10186_s | (fA)-TegChol (SEQ ID NO: 345) |
| 3′UTR_HTT_ | (fA)#(mG)#(fU)(mC)(fA)(mG)(fG)(mA)(fG)(mA)(fG)(mU)(fG)#(mC)# |
| 10809_s | (fA)-TegChol (SEQ ID NO: 346) |
| 3′UTR_HTT_ | (fU)#(mG)#(fG)(mG)(fU)(mA)(fU)(mU)(fG)(mA)(fA)(mU)(fG)#(mU)# |
| 11116_s | (fA)-TegChol (SEQ ID NO: 347) |
| 3′UTR_HTT_ | (fU)#(mG)#(fG)(mU)(fA)(mA)(fG)(mU)(fG)(mG)(fA)(mG)(fG)#(mA)# |
| 11129_s | (fA)-TegChol (SEQ ID NO: 348) |
| 3′UTR_HTT_ | (fA)#(mG)#(fU)(mG)(fG)(mA)(fG)(mG)(fA)(mA)(fA)(mU)(fG)#(mU)# |
| 11134_s | (fA)-TegChol (SEQ ID NO: 349) |
| 3′UTR_HTT_ | (fU)#(mU)#(fG)(mG)(fA)(mA)(fC)(mU)(fC)(mU)(fG)(mU)(fG)#(mC)# |
| 11147_s | (fA)-TegChol (SEQ ID NO: 350) |
| 3′UTR_HTT_ | (fU)#(mG)#(fA)(mG)(fG)(mA)(fG)(mG)(fC)(mC)(fC)(mU)(fU)#(mA)# |
| 11412_s | (fA)-TegChol (SEQ ID NO: 351) |
| 3′UTR_HTT_ | (fA)#(mG)#(fG)(mG)(fA)(mA)(fG)(mC)(fU)(mA)(fC)(mU)(fG)#(mA)# |
| 11426_s | (fA)-TegChol (SEQ ID NO: 352) |
| 3′UTR_HTT_ | (fA)#(mU)#(fA)(mA)(fC)(mA)(fC)(mG)(fU)(mA)(fA)(mG)(fA)#(mA)# |
| 11443_s | (fA)-TegChol (SEQ ID NO: 353) |
| 3′UTR_HTT_ | (fU)#(mA)#(fC)(mA)(fU)(mU)(fU)(mG)(fU)(mA)(fA)(mG)(fA)#(mA)# |
| 11659_s | (fA)-TegChol (SEQ ID NO: 354) |
| 3′UTR_HTT_ | (fG)#(mU)#(fA)(mA)(fG)(mA)(fA)(mA)(fU)(mA)(fA)(mC)(fA)#(mC)# |
| 11666_s | (fA)-TegChol (SEQ ID NO: 355) |
| 3′UTR_HTT_ | (fC)#(mA)#(fC)(mU)(fG)(mU)(fG)(mA)(fA)(mU)(fG)(mU)(fA)#(mA)# |
| 11677_s | (fA)-TegChol (SEQ ID NO: 356) |
| 3′UTR_HTT_ | (fG)#(mA)#(fG)(mC)(fU)(mC)(fA)(mU)(fU)(mA)(fG)(mU)(fA)#(mA)# |
| 11863_s | (fA)-TegChol (SEQ ID NO: 357) |
| 3′UTR_HTT_ | (fC)#(mA)#(fC)(mG)(fC)(mA)(fU)(mA)(fU)(mA)(fC)(mA)(fU)#(mA)# |
| 11890_s | (fA)-TegChol (SEQ ID NO: 358) |
| 3′UTR_HTT_ | (fG)#(mA)#(fC)(mA)(fC)(mA)(fU)(mC)(fU)(mA)(fU)(mA)(fA)#(mU)# |
| 11927_s | (fA)-TegChol (SEQ ID NO: 359) |
| 3′UTR_HTT_ | (fC)#(mA)#(fC)(mA)(fC)(mA)(fC)(mC)(fU)(mC)(fU)(mC)(fA)#(mA)# |
| 11947_s | (fA)-TegChol (SEQ ID NO: 360) |
| 3′UTR_HTT_ | (fU)#(mA)#(fU)(mC)(fA)(mU)(fG)(mU)(fU)(mC)(fC)(mU)(fA)#(mA)# |
| 12163_s | (fA)-TegChol (SEQ ID NO: 361) |
| 3′UTR_HTT_ | (fG)#(mC)#(fA)(mA)(fA)(mU)(fG)(mU)(fG)(mA)(fU)(mU)(fA)#(mA)# |
| 12218_s | (fA)-TegChol (SEQ ID NO: 362) |
| 3′UTR_HTT_ | (fU)#(mG)#(fU)(mG)(fA)(mU)(fU)(mA)(fA)(mU)(fU)(mU)(fG)#(mG)# |
| 12223_s | (fA)-TegChol (SEQ ID NO: 363) |
| 3′UTR_HTT_ | (fG)#(mG)#(fU)(mU)(fG)(mU)(fC)(mA)(fA)(mG)(fU)(mU)(fU)#(mU)# |
| 12235_s | (fA)-TegChol (SEQ ID NO: 364) |
| 3′UTR_HTT_ | (fU)#(mU)#(fU)(mC)(fC)(mU)(fG)(mC)(fU)(mG)(fG)(mU)(fA)#(mA)# |
| 12279_s | (fA)-TegChol (SEQ ID NO: 365) |
| 3′UTR_HTT_ | (fC)#(mC)#(fU)(mG)(fC)(mU)(fG)(mG)(fU)(mA)(fA)(mU)(fA)#(mU)# |
| 12282_s | (fA)-TegChol (SEQ ID NO: 366) |
| 3′UTR_HTT_ | (fG)#(mG)#(fG)(mA)(fA)(mA)(fG)(mA)(fU)(mU)(fU)(mU)(fA)#(mA)# |
| 12297_s | (fA)-TegChol (SEQ ID NO: 367) |
| 3′UTR_HTT_ | (fA)#(mA)#(fU)(mG)(fA)(mA)(fA)(mC)(fC)(mA)(fG)(mG)(fG)#(mU)# |
| 12309_s | (fA)-TegChol (SEQ ID NO: 368) |
| 3′UTR_HTT_ | (fA)#(mA)#(fA)(mC)(fC)(mA)(fG)(mG)(fG)(mU)(fA)(mG)(fA)#(mA)# |
| 12313_s | (fA)-TegChol (SEQ ID NO: 369) |
| 3′UTR_HTT_ | (fU)#(mU)#(fG)(mG)(fC)(mA)(fA)(mU)(fG)(mC)(fA)(mC)(fU)#(mG)# |
| 12331_s | (fA)-TegChol (SEQ ID NO: 370) |
| 3′UTR_HTT_ | (fC)#(mA)#(fG)(mU)(fU)(mG)(fU)(mU)(fU)(mC)(fU)(mA)(fA)#(mG)# |
| 13136_s | (fA)-TegChol (SEQ ID NO: 371) |
| 3′UTR_HTT_ | (fG)#(mA)#(fC)(mG)(fA)(mG)(fA)(mG)(fA)(mU)(fG)(mU)(fA)#(mU)# |
| 13398_s | (fA)-TegChol (SEQ ID NO: 372) |
| 3′UTR_HTT_ | (fG)#(mA)#(fG)(mA)(fU)(mG)(fU)(mA)(fU)(mA)(fU)(mU)(fU)#(mA)# |
| 13403_s | (fA)-TegChol (SEQ ID NO: 373) |
| 3′UTR_HTT_ | (fU)#(mA)#(fA)(mC)(fU)(mG)(fC)(mU)(fG)(mC)(fA)(mA)(fA)#(mC)# |
| 13423_s | (fA)-TegChol (SEQ ID NO: 374) |
| 3′UTR_HTT_ | (fG)#(mC)#(fU)(mG)(fC)(mA)(fA)(mA)(fC)(mA)(fU)(mU)(fG)#(mU)# |
| 13428_s | (fA)-TegChol (SEQ ID NO: 375) |

“f” corresponds to a nucleotide with a 2′-fluoro modification; “m” corresponds to a nucleotide with a 2′-O-methyl modification; “#” corresponds to a phosphorothioate internucleotide linkage; “P” corresponds to a 5′ phosphate; “TegChol” corresponds to a cholesterol moiety conjugated via a triethylene glycol linker

TABLE 17
Modified Sheep HTT mRNA targets sequences, sense and antisense strands,
additional embodiments.

| OLIGO | |
|---|---|
| ID | Modified Sequence |
| htt_222_ | P(mU)#(fU)#(mU)(fU)(fC)(fU)(mU)(fG)(mG)(fU)(mG)(fG)(mC)#(fU)#(mG) |
| as | #(fA)#(mG)#(mA)#(mG)#(fC) (SEQ ID NO: 376) |
| htt_1692_ | P(mU)#(fU)#(mU)(fC)(fA)(fG)(mA)(fA)(mC)(fU)(mG)(fU)(mC)#(fG)#(mG)# |
| as | (fA)#(mA)#(mG)#(mG)#(fG) (SEQ ID NO: 377) |
| htt_8725_ | P(mU)#(fU)#(mU)(fC)(fC)(fU)(mG)(fU)(mG)(fU)(mA)(fC)(mA)#(fU)#(mG)# |
| as | (fC)#(mA)#(mG)#(mG)#(fU) (SEQ ID NO: 378) |
| htt_450_ | P(mU)#(fU)#(mU)(fC)(fC)(fU)(mU)(fG)(mU)(fA)(mG)(fA)(mG)#(fU)#(mU) |
| as | #(fC)#(mU)#(mA)#(mG)#(fC) (SEQ ID NO: 379) |
| htt_4692_ | P(mU)#(fG)#(mU)(fA)(fC)(fU)(mG)(fG)(mA)(fU)(mG)(fA)(mG)#(fU)#(mC) |
| as | #(fU)#(mC)#(mA)#(mG)#(fC) (SEQ ID NO: 380) |
| htt_454_ | P(mU)#(fU)#(mA)(fA)(fU)(fU)(mU)(fC)(mC)(fU)(mU)(fG)(mU)#(fA)#(mG) |
| as | #(fA)#(mG)#(mU)#(mU)#(fC) (SEQ ID NO: 381) |
| htt_4392_ | P(mU)#(fG)#(mU)(fA)(fU)(fU)(mC)(fA)(mA)(fA)(mC)(fU)(mG)#(fC)#(mU)# |
| as | (fU)#(mC)#(mA)#(mG)#(fC) (SEQ ID NO: 382) |
| htt_2155_ | P(mU)#(fU)#(mG)(fU)(fA)(fG)(mA)(fG)(mU)(fU)(mU)(fG)(mC)#(fU)#(mG) |
| as | #(fA)#(mA)#(mG)#(mA)#(fA) (SEQ ID NO: 383) |
| htt_8733_ | P(mU)#(fU)#(mU)(fU)(fC)(fU)(mC)(fC)(mU)(fU)(mU)(fC)(mC)#(fU)#(mG)# |
| as | (fU)#(mG)#(mU)#(mA)#(fC) (SEQ ID NO: 384) |
| htt_2387_ | P(mU)#(fU)#(mU)(fC)(fU)(fG)(mC)(fA)(mG)(fC)(mA)(fG)(mG)#(fG)#(mG)# |
| as | (fA)#(mA)#(mU)#(mG)#(fC) (SEQ ID NO: 385) |
| htt_2930_ | P(mU)#(fG)#(mU)(fG)(fA)(fU)(mG)(fC)(mU)(fU)(mG)(fG)(mU)#(fA)#(mG) |
| as | #(fC)#(mA)#(mG)#(mG)#(fU) (SEQ ID NO: 386) |
| htt_661_ | P(mU)#(fU)#(mC)(fG)(fC)(fA)(mA)(fA)(mG)(fU)(mU)(fG)(mC)#(fC)#(mA)# |
| as | (fA)#(mA)#(mA)#(mG)#(fA) (SEQ ID NO: 387) |
| htt_4194_ | P(mU)#(fC)#(mU)(fU)(fG)(fU)(mC)(fU)(mG)(fC)(mU)(fC)(mG)#(fG)#(mU)# |
| as | (fU)#(mC)#(mU)#(mU)#(fU) (SEQ ID NO: 388) |
| htt_669_ | P(mU)#(fA)#(mU)(fU)(fG)(fU)(mC)(fG)(mU)(fU)(mC)(fG)(mC)#(fA)#(mA)# |
| as | (fA)#(mG)#(mU)#(mU)#(fG) (SEQ ID NO: 389) |
| htt_4437_ | P(mU)#(fG)#(mU)(fU)(fU)(fG)(mG)(fG)(mA)(fU)(mA)(fA)(mU)#(fC)#(mG) |
| as | #(fC)#(mC)#(mU)#(mC)#(fU) (SEQ ID NO: 390) |
| htt_8508_ | P(mU)#(fC)#(mU)(fG)(fU)(fA)(mU)(fG)(mA)(fU)(mG)(fG)(mA)#(fG)#(mG) |
| as | #(fC)#(mC)#(mG)#(mA)#(fG) (SEQ ID NO: 391) |
| htt_2671_ | P(mU)#(fG)#(mU)(fA)(fC)(fC)(mC)(fG)(mC)(fU)(mC)(fU)(mU)#(fG)#(mC)# |
| as | (fA)#(mG)#(mC)#(mU)#(fU) (SEQ ID NO: 392) |
| htt_4633_ | P(mU)#(fU)#(mU)(fC)(fC)(fU)(mG)(fC)(mA)(fU)(mC)(fA)(mG)#(fC)#(mC)# |
| as | (fU)#(mU)#(mA)#(mU)#(fU) (SEQ ID NO: 393) |
| htt_414_ | P(mU)#(fA)#(mG)(fA)(fG)(fU)(mC)(fC)(mA)(fU)(mC)(fA)(mA)#(fA)#(mG)# |
| as | (fC)#(mU)#(mU)#(mU)#(fU) (SEQ ID NO: 394) |
| htt_325_ | P(mU)#(fA)#(mA)(fA)(fG)(fU)(mU)(fC)(mC)(fA)(mU)(fA)(mG)#(fC)#(mG)# |
| as | (fA)#(mU)#(mG)#(mC)#(fC) (SEQ ID NO: 395) |
| htt_1244_ | P(mU)#(fU)#(mU)(fU)(fC)(fU)(mU)(fG)(mA)(fA)(mA)(fG)(mG)#(fA)#(mC) |
| as | #(fA)#(mG)#(mG)#(mG)#(fC) (SEQ ID NO: 396) |
| htt_4249_ | P(mU)#(fU)#(mC)(fA)(fG)(fU)(mG)(fC)(mU)(fU)(mU)(fU)(mA)#(fU)#(mG) |
| as | #(fA)#(mC)#(mG)#(mA)#(fG) (SEQ ID NO: 397) |
| htt_6372_ | P(mU)#(fC)#(mA)(fG)(fG)(fU)(mU)(fG)(mA)(fA)(mC)(fU)(mC)#(fC)#(mG)# |
| as | (fA)#(mG)#(mU)#(mG)#(fC) (SEQ ID NO: 398) |
| htt_3811_ | P(mU)#(fU)#(mC)(fC)(fC)(fA)(mA)(fU)(mG)(fU)(mC)(fC)(mU)#(fG)#(mC)# |
| as | (fA)#(mG)#(mC)#(mG)#(fU) (SEQ ID NO: 399) |
| htt_1249_ | P(mU)#(fU)#(mU)(fU)(fG)(fU)(mU)(fU)(mU)(fC)(mU)(fU)(mG)#(fA)#(mA) |
| as | #(fA)#(mG)#(mG)#(mA)#(fC) (SEQ ID NO: 400) |
| htt_677_ | P(mU)#(fU)#(mU)(fA)(fA)(fU)(mC)(fU)(mC)(fA)(mU)(fU)(mG)#(fU)#(mC)# |
| as | (fG)#(mU)#(mU)#(mC)#(fG) (SEQ ID NO: 401) |
| htt_2370_ | P(mU)#(fG)#(mC)(fA)(fG)(fU)(mC)(fC)(mG)(fC)(mC)(fA)(mG)#(fA)#(mG)# |
| as | (fA)#(mA)#(mA)#(mA)#(fU) (SEQ ID NO: 402) |
| htt_3679_ | P(mU)#(fU)#(mC)(fA)(fG)(fG)(mA)(fC)(mG)(fU)(mC)(fG)(mU)#(fG)#(mC)# |
| as | (fA)#(mG)#(mU)#(mU)#(fU) (SEQ ID NO: 403) |
| htt_6013_ | P(mU)#(fU)#(mU)(fG)(fC)(fG)(mG)(fC)(mC)(fA)(mA)(fA)(mA)#(fG)#(mC)# |
| as | (fA)#(mU)#(mU)#(mU)#(fC) (SEQ ID NO: 404) |
| htt_4386_ | P(mU)#(fA)#(mA)(fA)(fC)(fU)(mG)(fC)(mU)(fU)(mC)(fA)(mG)#(fC)#(mA)# |
| as | (fC)#(mA)#(mA)#(mA)#(fU) (SEQ ID NO: 405) |
| htt_349_ | P(mU)#(fC)#(mU)(fG)(fC)(fG)(mU)(fC)(mA)(fU)(mC)(fA)(mC)#(fU)#(mG)# |
| as | (fC)#(mA)#(mC)#(mA)#(fG) (SEQ ID NO: 406) |
| htt_7300_ | P(mU)#(fU)#(mG)(fA)(fU)(fG)(mC)(fG)(mG)(fU)(mA)(fG)(mA)#(fU)#(mG) |
| as | #(fA)#(mA)#(mC)#(mU)#(fC) (SEQ ID NO: 407) |
| htt_8724_ | P(mU)#(fU)#(mC)(fC)(fU)(fG)(mU)(fG)(mU)(fA)(mC)(fA)(mU)#(fG)#(mC)# |
| as | (fA)#(mG)#(mG)#(mU)#(fG) (SEQ ID NO: 408) |
| htt_633_ | P(mU)#(fU)#(mU)(fU)(fA)(fG)(mG)(fG)(mA)(fU)(mC)(fG)(mC)#(fU)#(mG) |
| as | #(fC)#(mA)#(mG)#(mC)#(fC) (SEQ ID NO: 409) |
| htt_316_ | P(mU)#(fU)#(mA)(fG)(fC)(fG)(mA)(fU)(mG)(fC)(mC)(fC)(mA)#(fG)#(mA)# |
| as | (fA)#(mG)#(mU)#(mU)#(fU) (SEQ ID NO: 410) |
| htt_2785_ | P(mU)#(fG)#(mU)(fC)(fC)(fU)(mC)(fG)(mG)(fU)(mC)(fG)(mC)#(fA)#(mC)# |
| as | (fU)#(mU)#(mG)#(mU)#(fA) (SEQ ID NO: 411) |
| htt_4257_ | P(mU)#(fG)#(mU)(fA)(fC)(fU)(mG)(fC)(mU)(fU)(mC)(fA)(mG)#(fU)#(mG)# |
| as | (fC)#(mU)#(mU)#(mU)#(fU) (SEQ ID NO: 412) |
| htt_7296_ | P(mU)#(fG)#(mC)(fG)(fG)(fU)(mA)(fG)(mA)(fU)(mG)(fA)(mA)#(fC)#(mU) |
| as | #(fC)#(mU)#(mU)#(mU)#(fA) (SEQ ID NO: 413) |
| htt_5191_ | P(mU)#(fC)#(mC)(fA)(fG)(fU)(mU)(fG)(mG)(fA)(mG)(fC)(mA)#(fG)#(mA)# |
| as | (fA)#(mA)#(mC)#(mC)#(fU) (SEQ ID NO: 414) |
| htt_2701_ | P(mU)#(fC)#(mU)(fC)(fC)(fA)(mA)(fG)(mC)(fA)(mG)(fA)(mU)#(fG)#(mG)# |
| as | (fA)#(mU)#(mG)#(mA)#(fC) (SEQ ID NO: 415) |
| htt_2758_ | P(mU)#(fU)#(mU)(fG)(fG)(fG)(mA)(fC)(mG)(fA)(mG)(fC)(mC)#(fU)#(mC)# |
| as | (fA)#(mU)#(mC)#(mA)#(fA) (SEQ ID NO: 416) |
| htt_439_ | P(mU)#(fG)#(mU)(fU)(fC)(fU)(mA)(fG)(mC)(fU)(mG)(fC)(mA)#(fA)#(mC)# |
| as | (fC)#(mU)#(mC)#(mG)#(fG) (SEQ ID NO: 417) |
| htt_3899_ | P(mU)#(fU)#(mU)(fC)(fA)(fG)(mC)(fA)(mA)(fC)(mU)(fG)(mC)#(fU)#(mG)# |
| as | (fA)#(mA)#(mC)#(mA)#(fC) (SEQ ID NO: 418) |
| htt_6105_ | P(mU)#(fC)#(mU)(fG)(fG)(fU)(mG)(fU)(mC)(fU)(mC)(fU)(mG)#(fU)#(mG)# |
| as | (fC)#(mU)#(mA)#(mA)#(fC) (SEQ ID NO: 419) |
| htt_2154_ | P(mU)#(fG)#(mU)(fA)(fG)(fA)(mG)(fU)(mU)(fU)(mG)(fC)(mU)#(fG)#(mA) |
| as | #(fA)#(mG)#(mA)#(mA)#(fA) (SEQ ID NO: 420) |
| htt_3554_ | P(mU)#(fU)#(mU)(fC)(fU)(fU)(mG)(fG)(mG)(fA)(mC)(fU)(mC)#(fA)#(mC)# |
| as | (fG)#(mG)#(mG)#(mC)#(fA) (SEQ ID NO: 421) |
| htt_255_ | P(mU)#(fU)#(mU)(fC)(fA)(fC)(mA)(fG)(mA)(fU)(mU)(fG)(mU)#(fC)#(mA)# |
| as | (fG)#(mA)#(mC)#(mA)#(fG) (SEQ ID NO: 422) |
| htt_1973_ | P(mU)#(fU)#(mC)(fA)(fG)(fU)(mG)(fG)(mA)(fC)(mU)(fG)(mG)#(fC)#(mC)# |
| as | (fA)#(mA)#(mU)#(mG)#(fU) (SEQ ID NO: 423) |
| htt_3838_ | P(mU)#(fG)#(mG)(fU)(fA)(fU)(mC)(fC)(mC)(fA)(mG)(fG)(mA)#(fU)#(mC)# |
| as | (fU)#(mC)#(mU)#(mU)#(fC) (SEQ ID NO: 424) |
| htt_200_ | (mC)#(mA)#(fC)(mC)(fG)(mA)(fC)(mC)(fA)(mA)(mA)(mG)(fA)#(mA)#(mA)- |
| s | TegChol (SEQ ID NO: 425) |
| htt_222_ | (mC)#(mA)#(fG)(mC)(fC)(mA)(fC)(mC)(fA)(mA)(mG)(mA)(fA)#(mA)#(mA)- |
| s | TegChol (SEQ ID NO: 426) |
| htt_1692_ | (mC)#(mC)#(fG)(mA)(fC)(mA)(fG)(mU)(fU)(mC)(mU)(mG)(fA)#(mA)#(mA)- |
| s | TegChol (SEQ ID NO: 427) |
| htt_8725_ | (mC)#(mA)#(fU)(mG)(fU)(mA)(fC)(mA)(fC)(mA)(mG)(mG)(fA)#(mA)#(mA)- |
| s | TegChol (SEQ ID NO: 428) |
| htt_450_ | (mA)#(mA)#(fC)(mU)(fC)(mU)(fA)(mC)(fA)(mA)(mG)(mG)(fA)#(mA)#(mA)- |
| s | TegChol (SEQ ID NO: 429) |
| htt_4692_ | (mG)#(mA)#(fC)(mU)(fC)(mA)(fU)(mC)(fC)(mA)(mG)(mU)(fA)#(mC)#(mA)- |
| s | TegChol (SEQ ID NO: 430) |
| htt_454_ | (mC)#(mU)#(fA)(mC)(fA)(mA)(fG)(mG)(fA)(mA)(mA)(mU)(fU)#(mA)#(mA)- |
| s | TegChol (SEQ ID NO: 431) |
| htt_4392_ | (mA)#(mG)#(fC)(mA)(fG)(mU)(fU)(mU)(fG)(mA)(mA)(mU)(fA)#(mC)#(mA)- |
| s | TegChol (SEQ ID NO: 432) |
| htt_2155_ | (mC)#(mA)#(fG)(mC)(fA)(mA)(fA)(mC)(fU)(mC)(mU)(mA)(fC)#(mA)#(mA)- |
| s | TegChol (SEQ ID NO: 433) |
| htt_8733_ | (mC)#(mA)#(fG)(mG)(fA)(mA)(fA)(mG)(fG)(mA)(mG)(mA)(fA)#(mA)#(mA)- |
| s | TegChol (SEQ ID NO: 434) |
| htt_2387_ | (mC)#(mC)#(fC)(mC)(fU)(mG)(fC)(mU)(fG)(mC)(mA)(mG)(fA)#(mA)#(mA)- |
| s | TegChol (SEQ ID NO: 435) |
| htt_2930_ | (mC)#(mU)#(fA)(mC)(fC)(mA)(fA)(mG)(fC)(mA)(mU)(mC)(fA)#(mC)#(mA)- |
| s | TegChol (SEQ ID NO: 436) |
| htt_661_ | (mU)#(mG)#(fG)(mC)(fA)(mA)(fC)(mU)(fU)(mU)(mG)(mC)(fG)#(mA)#(mA)- |
| s | TegChol (SEQ ID NO: 437) |
| htt_4194_ | (mA)#(mC)#(fC)(mG)(fA)(mG)(fC)(mA)(fG)(mA)(mC)(mA)(fA)#(mG)#(mA)- |
| s | TegChol (SEQ ID NO: 438) |
| htt_669_ | (mU)#(mU)#(fG)(mC)(fG)(mA)(fA)(mC)(fG)(mA)(mC)(mA)(fA)#(mU)#(mA)- |
| s | TegChol (SEQ ID NO: 439) |
| htt_4437_ | (mC)#(mG)#(fA)(mU)(fU)(mA)(fU)(mC)(fC)(mC)(mA)(mA)(fA)#(mC)#(mA)- |
| s | TegChol (SEQ ID NO: 440) |
| htt_8508_ | (mC)#(mC)#(fU)(mC)(fC)(mA)(fU)(mC)(fA)(mU)(mA)(mC)(fA)#(mG)#(mA)- |
| s | TegChol (SEQ ID NO: 441) |
| htt_2671_ | (mG)#(mC)#(fA)(mA)(fG)(mA)(fG)(mC)(fG)(mG)(mG)(mU)(fA)#(mC)#(mA)- |
| s | TegChol (SEQ ID NO: 442) |
| htt_4633_ | (mG)#(mG)#(fC)(mU)(fG)(mA)(fU)(mG)(fC)(mA)(mG)(mG)(fA)#(mA)#(mA)- |
| s | TegChol (SEQ ID NO: 443) |
| htt_414_ | (mC)#(mU)#(fU)(mU)(fG)(mA)(fU)(mG)(fG)(mA)(mC)(mU)(fC)#(mU)#(mA)- |
| s | TegChol (SEQ ID NO: 444) |
| htt_325_ | (mC)#(mG)#(fC)(mU)(fA)(mU)(fG)(mG)(fA)(mA)(mC)(mU)(fU)#(mU)#(mA)- |
| s | TegChol (SEQ ID NO: 445) |
| htt_1244_ | (mG)#(mU)#(fC)(mC)(fU)(mU)(fU)(mC)(fA)(mA)(mG)(mA)(fA)#(mA)#(mA)- |
| s | TegChol (SEQ ID NO: 446) |
| htt_4249_ | (mC)#(mA)#(fU)(mA)(fA)(mA)(fA)(mG)(fC)(mA)(mC)(mU)(fG)#(mA)#(mA)- |
| s | TegChol (SEQ ID NO: 447) |
| htt_6372_ | (mC)#(mG)#(fG)(mA)(fG)(mU)(fU)(mC)(fA)(mA)(mC)(mC)(fU)#(mG)#(mA)- |
| s | TegChol (SEQ ID NO: 448) |
| htt_3811_ | (mG)#(mC)#(fA)(mG)(fG)(mA)(fC)(mA)(fU)(mU)(mG)(mG)(fG)#(mA)#(mA)- |
| s | TegChol (SEQ ID NO: 449) |
| htt_1249_ | (mU)#(mU)#(fC)(mA)(fA)(mG)(fA)(mA)(fA)(mA)(mC)(mA)(fA)#(mA)#(mA)- |
| s | TegChol (SEQ ID NO: 450) |
| htt_677_ | (mG)#(mA)#(fC)(mA)(fA)(mU)(fG)(mA)(fG)(mA)(mU)(mU)(fA)#(mA)#(mA)- |
| s | TegChol (SEQ ID NO: 451) |
| htt_2370_ | (mC)#(mU)#(fC)(mU)(fG)(mG)(fC)(mG)(fG)(mA)(mC)(mU)(fG)#(mC)#(mA)- |
| s | TegChol (SEQ ID NO: 452) |
| htt_3679_ | (mG)#(mC)#(fA)(mC)(fG)(mA)(fC)(mG)(fU)(mC)(mC)(mU)(fG)#(mA)#(mA)- |
| s | TegChol (SEQ ID NO: 453) |
| htt_6013_ | (mG)#(mC)#(fU)(mU)(fU)(mU)(fG)(mG)(fC)(mC)(mG)(mC)(fA)#(mA)#(mA)- |
| s | TegChol (SEQ ID NO: 454) |
| htt_4386_ | (mU)#(mG)#(fC)(mU)(fG)(mA)(fA)(mG)(fC)(mA)(mG)(mU)(fU)#(mU)#(mA)- |
| s | TegChol (SEQ ID NO: 455) |
| htt_349_ | (mC)#(mA)#(fG)(mU)(fG)(mA)(fU)(mG)(fA)(mC)(mG)(mC)(fA)#(mG)#(mA)- |
| s | TegChol (SEQ ID NO: 456) |
| htt_7300_ | (mC)#(mA)#(fU)(mC)(fU)(mA)(fC)(mC)(fG)(mC)(mA)(mU)(fC)#(mA)#(mA)- |
| s | TegChol (SEQ ID NO: 457) |
| htt_8724_ | (mG)#(mC)#(fA)(mU)(fG)(mU)(fA)(mC)(fA)(mC)(mA)(mG)(fG)#(mA)#(mA)- |
| s | TegChol (SEQ ID NO: 458) |
| htt_633_ | (mC)#(mA)#(fG)(mC)(fG)(mA)(fU)(mC)(fC)(mC)(mU)(mA)(fA)#(mA)#(mA)- |
| s | TegChol (SEQ ID NO: 459) |
| htt_316_ | (mU)#(mC)#(fU)(mG)(fG)(mG)(fC)(mA)(fU)(mC)(mG)(mC)(fU)#(mA)#(mA)- |
| s | TegChol (SEQ ID NO: 460) |
| htt_2785_ | (mG)#(mU)#(fG)(mC)(fG)(mA)(fC)(mC)(fG)(mA)(mG)(mG)(fA)#(mC)#(mA)- |
| s | TegChol (SEQ ID NO: 461) |
| htt_4257_ | (mC)#(mA)#(fC)(mU)(fG)(mA)(fA)(mG)(fC)(mA)(mG)(mU)(fA)#(mC)#(mA)- |
| s | TegChol (SEQ ID NO: 462) |
| htt_7296_ | (mA)#(mG)#(fU)(mU)(fC)(mA)(fU)(mC)(fU)(mA)(mC)(mC)(fG)#(mC)#(mA)- |
| s | TegChol (SEQ ID NO: 463) |
| htt_5191_ | (mU)#(mC)#(fU)(mG)(fC)(mU)(fC)(mC)(fA)(mA)(mC)(mU)(fG)#(mG)#(mA)- |
| s | TegChol (SEQ ID NO: 464) |
| htt_2701_ | (mC)#(mC)#(fA)(mU)(fC)(mU)(fG)(mC)(fU)(mU)(mG)(mG)(fA)#(mG)#(mA)- |
| s | TegChol (SEQ ID NO: 465) |
| htt_2758_ | (mG)#(mA)#(fG)(mG)(fC)(mU)(fC)(mG)(fU)(mC)(mC)(mC)(fA)#(mA)#(mA)- |
| s | TegChol (SEQ ID NO: 466) |
| htt_439_ | (mG)#(mU)#(fU)(mG)(fC)(mA)(fG)(mC)(fU)(mA)(mG)(mA)(fA)#(mC)#(mA)- |
| s | TegChol (SEQ ID NO: 467) |
| htt_3899_ | (mC)#(mA)#(fG)(mC)(fA)(mG)(fU)(mU)(fG)(mC)(mU)(mG)(fA)#(mA)#(mA)- |
| s | TegChol (SEQ ID NO: 468) |
| htt_6105_ | (mC)#(mA)#(fC)(mA)(fG)(mA)(fG)(mA)(fC)(mA)(mC)(mC)(fA)#(mG)#(mA)- |
| s | TegChol (SEQ ID NO: 469) |
| htt_2154_ | (mU)#(mC)#(fA)(mG)(fC)(mA)(fA)(mA)(fC)(mU)(mC)(mU)(fA)#(mC)#(mA)- |
| s | TegChol (SEQ ID NO: 470) |
| htt_3554_ | (mG)#(mU)#(fG)(mA)(fG)(mU)(fC)(mC)(fC)(mA)(mA)(mG)(fA)#(mA)#(mA)- |
| s | TegChol (SEQ ID NO: 471) |
| htt_255_ | (mU)#(mG)#(fA)(mC)(fA)(mA)(fU)(mC)(fU)(mG)(mU)(mG)(fA)#(mA)#(mA)- |
| s | TegChol (SEQ ID NO: 472) |
| htt_1973_ | (mG)#(mG)#(fC)(mC)(fA)(mG)(fU)(mC)(fC)(mA)(mC)(mU)(fG)#(mA)#(mA)- |
| s | TegChol (SEQ ID NO: 473) |
| htt_3838_ | (mG)#(mA)#(fU)(mC)(fC)(mU)(fG)(mG)(fG)(mA)(mU)(mA)(fC)#(mC)#(mA)- |
| s | TegChol (SEQ ID NO: 474) |

“f” corresponds to a nucleotide with a 2′-fluoro modification; “m” corresponds to a nucleotide with a 2′-O-methyl modification; “#” corresponds to a phosphorothioate internucleotide linkage; “P” corresponds to a 5′ phosphate; “TegChol” corresponds to a cholesterol moiety conjugated via a triethylene glycol linker

### Example 2. In Vivo Silencing of HTT-1A in the Mouse Brain

[0625] Based on the results of the screens performed in Example, the HTT-1A target sites designated HTT1a_634 and HTT1a_486, were selected for further study in the mouse brain. An additional HTT gene targeting siRNA outside of intron 1 (HTT_10150) was also used, and the sequences are recited below.

HTT 10150:
(SEQ ID NO: 475)
Antisense strand: UUAAUCUCUUUACUGAUAUA
(SEQ ID NO: 476)
Sense strand: CAGUAAAGAGAUUAA
HTT1a_634:
(SEQ ID NO: 1022)
Antisense strand: UUAACUACACUACACCACAA
(SEQ ID NO: 1023)
Sense strand: GUGUAGUGUAGUUAA
HTT1a_486:
(SEQ ID NO: 1024)
Antisense strand: UUAAAAGCAUUAUGUCAUCC
(SEQ ID NO: 1025)
Sense strand: ACAUAAUGCUUUUAA

[0626] HTT_10150 was used alone, while HTT1a_486 and HTT1a_634 were used as a cocktail. The Q111 mouse model (CAG111 mouse model) was used, which contains a mutant HTT gene that encodes a polyQ tract off 111 Q amino acids. Mice were given a 10 nmol dose of the siRNA in a 10 μl volume, administered via an intracerebroventricular (ICV) route. No treatment control mice were used for comparison. After a one-month incubation period, mice were sacrificed and WT HTT and mutant HTT (with the polyQ tract) protein levels were determined (FIG. 6 and FIG. 7). Protein levels were measured in the mouse striatum, medial cortex, posterior cortex, and thalamus. In all brain structures, mice receiving HTT-1A targeting siRNA had substantially reduced levels of WT and mutant HTT protein relative to control.

### Example 3. In Vitro Identification of HTT-1A Targeting Sequences

[0627] An additional screen was performed against the HTT-1A gene for mRNA knockdown. A panel of siRNAs targeting several different sequences of the human and mouse HTT-1A mRNA was developed and screened in mouse embryonic fibroblast (MEF) cells derived from YAC128 mice. YAC128 mice express both the HTT-1A gene and HTT with a CAG expansion. The siRNAs were each tested at a concentration of 1.5 M and the mRNA was evaluated with the QuantiGene gene expression assay (ThermoFisher, Waltham, MA) at the 72 hours timepoint. FIG. 8, FIG. 12B, and FIG. 13 depict the results of the screen against human HTT-1A mRNA. siRNAs targeting HTT-1A mRNA regions designated HTT-1A 424, HTT-1A 434, HTT-1A 452, HTT-1A 515, HTT-1A 596, HTT-1A 601, HTT-1A 620, HTT-1A 659, HTT-1A 1664, HTT-1A 1665, and HTT-1A 1666 achieved the highest silencing efficacy of HTT-1A mRNA relative to % untreated control.

[0628] The same MEF cells from YAC128 mice were used to repeat the siRNA screen described in Example 1. As shown in FIG. 9, siRNAs targeting HTT-1A mRNA regions designated HTT-1A 757, HTT-1A 774, HTT-1A 779, HTT-1A 866, HTT-1A 1102, HTT-1A 1654, HTT-1A 1799, HTT-1A 1864, and HTT-1A 1940 achieved the highest silencing efficacy.

[0629] Based on the results of the above screen, dose response curves were generated against select siRNAs. The curves were also generated in MEFs from YAC128 mice. As shown in FIG. 10A-FIG. 10G, siRNAs targeting HTT-1A 424, HTT-1A 434, HTT-1A 452, HTT-1A 515, HTT-1A 779, HTT-1A 1654, and HTT-1A 1799 displayed efficacious silencing of HTT-1A. As shown in FIG. 14A-FIG. 14D, siRNAs targeting HTT-1A 1664, HTT-1A 1665, and HTT-1A 1666 displayed efficacious silencing of HTT-1A

[0630] Table 18 below recites the 45-nucleotide gene regions of the target HTT-1A regions. Table 19 below recites the 20-nucleotide mRNA target HTT-1A regions. Table 20 below recites the siRNA antisense and sense strand sequences. Table 21 below recites the siRNA antisense and sense strand sequences with the specific chemical modification patterns, as used in the screens of Example 3.

TABLE 18
45-nucleotide gene regions

| Name | Gene region |
|---|---|
| HTT1a_412 | GGAGCCGCTGCACCGACTGAGTTTGGGCCCGCTGCAGCTCCCTGT |
| | (SEQ ID NO: 477) |
| HTT1a_414 | AGCCGCTGCACCGACTGAGTTTGGGCCCGCTGCAGCTCCCTGTCC |
| | (SEQ ID NO: 478) |
| HTT1a_418 | GCTGCACCGACTGAGTTTGGGCCCGCTGCAGCTCCCTGTCCCGGC |
| | (SEQ ID NO: 479) |
| HTT1a_424 | CCGACTGAGTTTGGGCCCGCTGCAGCTCCCTGTCCCGGCGGGTCC |
| | (SEQ ID NO: 27) |
| HTT1a_434 | TTGGGCCCGCTGCAGCTCCCTGTCCCGGCGGGTCCCAGGCTACGG |
| | (SEQ ID NO: 28) |
| HTT1a_447 | AGCTCCCTGTCCCGGCGGGTCCCAGGCTACGGCGGGGATGGCGGT |
| | (SEQ ID NO: 480) |
| HTT1a_449 | CTCCCTGTCCCGGCGGGTCCCAGGCTACGGCGGGGATGGCGGTAA |
| | (SEQ ID NO: 481) |
| HTT1a_452 | CCTGTCCCGGCGGGTCCCAGGCTACGGCGGGGATGGCGGTAACCC |
| | (SEQ ID NO: 29) |
| HTT1a_453 | CTGTCCCGGCGGGTCCCAGGCTACGGCGGGGATGGCGGTAACCCT |
| | (SEQ ID NO: 482) |
| HTT1a_459 | CGGCGGGTCCCAGGCTACGGCGGGGATGGCGGTAACCCTGCAGCC |
| | (SEQ ID NO: 483) |
| HTT1a_460 | GGCGGGTCCCAGGCTACGGCGGGGATGGCGGTAACCCTGCAGCCT |
| | (SEQ ID NO: 484) |
| HTT1a_465 | GTCCCAGGCTACGGCGGGGATGGCGGTAACCCTGCAGCCTGCGGG |
| | (SEQ ID NO: 485) |
| HTT1a_468 | CCAGGCTACGGCGGGGATGGCGGTAACCCTGCAGCCTGCGGGCCG |
| | (SEQ ID NO: 486) |
| HTT1a_471 | GGCTACGGCGGGGATGGCGGTAACCCTGCAGCCTGCGGGCCGGCG |
| | (SEQ ID NO: 487) |
| HTT1a_472 | GCTACGGGGGGATGGCGGTAACCCTGCAGCCTGCGGGCCGGCGA |
| | (SEQ ID NO: 488) |
| HTT1a_474 | TACGGCGGGGATGGCGGTAACCCTGCAGCCTGCGGGCCGGCGACA |
| | (SEQ ID NO: 489) |
| HTT1a_491 | TAACCCTGCAGCCTGCGGGCCGGCGACACGAACCCCCGGCCCCGC |
| | (SEQ ID NO: 490) |
| HTT1a_515 | GACACGAACCCCCGGCCCCGCAGAGACAGAGTGACCCAGCAACCC |
| | (SEQ ID NO: 30) |
| HTT1a_518 | ACGAACCCCCGGCCCCGCAGAGACAGAGTGACCCAGCAACCCAGA |
| | (SEQ ID NO: 491) |
| HTT1a_523 | CCCCCGGCCCCGCAGAGACAGAGTGACCCAGCAACCCAGAGCCCA |
| | (SEQ ID NO: 492) |
| HTT1a_539 | GACAGAGTGACCCAGCAACCCAGAGCCCATGAGGGACACCCGCCC |
| | (SEQ ID NO: 493) |
| HTT1a_546 | TGACCCAGCAACCCAGAGCCCATGAGGGACACCCGCCCCCTCCTG |
| | (SEQ ID NO: 494) |
| HTT1a_596 | AGGCCTTCCCCCACTTCAGCCCCGCTCCCTCACTTGGGTCTTCCC |
| | (SEQ ID NO: 31) |
| HTT1a_597 | GGCCTTCCCCCACTTCAGCCCCGCTCCCTCACTTGGGTCTTCCCT |
| | (SEQ ID NO: 495) |
| HTT1a_598 | GCCTTCCCCCACTTCAGCCCCGCTCCCTCACTTGGGTCTTCCCTT |
| | (SEQ ID NO: 496) |
| HTT1a_599 | CCTTCCCCCACTTCAGCCCCGCTCCCTCACTTGGGTCTTCCCTTG |
| | (SEQ ID NO: 497) |
| HTT1a_601 | TTCCCCCACTTCAGCCCCGCTCCCTCACTTGGGTCTTCCCTTGTC |
| | (SEQ ID NO: 32) |
| HTT1a_603 | CCCCCACTTCAGCCCCGCTCCCTCACTTGGGTCTTCCCTTGTCCT |
| | (SEQ ID NO: 498) |
| HTT1a_604 | CCCCACTTCAGCCCCGCTCCCTCACTTGGGTCTTCCCTTGTCCTC |
| | (SEQ ID NO: 499) |
| HTT1a_606 | CCACTTCAGCCCCGCTCCCTCACTTGGGTCTTCCCTTGTCCTCTC |
| | (SEQ ID NO: 500) |
| HTT1a_612 | CAGCCCCGCTCCCTCACTTGGGTCTTCCCTTGTCCTCTCGCGAGG |
| | (SEQ ID NO: 501) |
| HTT1a_615 | CCCCGCTCCCTCACTTGGGTCTTCCCTTGTCCTCTCGCGAGGGGA |
| | (SEQ ID NO: 502) |
| HTT1a_619 | GCTCCCTCACTTGGGTCTTCCCTTGTCCTCTCGCGAGGGGAGGCA |
| | (SEQ ID NO: 503) |
| HTT1a_620 | CTCCCTCACTTGGGTCTTCCCTTGTCCTCTCGCGAGGGGAGGCAG |
| | (SEQ ID NO: 33) |
| HTT1a_621 | TCCCTCACTTGGGTCTTCCCTTGTCCTCTCGCGAGGGGAGGCAGA |
| | (SEQ ID NO: 504) |
| HTT1a_622 | CCCTCACTTGGGTCTTCCCTTGTCCTCTCGCGAGGGGAGGCAGAG |
| | (SEQ ID NO: 505) |
| HTT1a_638 | CCCTTGTCCTCTCGCGAGGGGAGGCAGAGCCTTGTTGGGGCCTGT |
| | (SEQ ID NO: 506) |
| HTT1a_639 | CCTTGTCCTCTCGCGAGGGGAGGCAGAGCCTTGTTGGGGCCTGTC |
| | (SEQ ID NO: 507) |
| HTT1a_641 | TTGTCCTCTCGCGAGGGGAGGCAGAGCCTTGTTGGGGCCTGTCCT |
| | (SEQ ID NO: 508) |
| HTT1a_642 | TGTCCTCTCGCGAGGGGAGGCAGAGCCTTGTTGGGGCCTGTCCTG |
| | (SEQ ID NO: 509) |
| HTT1a_643 | GTCCTCTCGCGAGGGGAGGCAGAGCCTTGTTGGGGCCTGTCCTGA |
| | (SEQ ID NO: 510) |
| HTT1a_644 | TCCTCTCGCGAGGGGAGGCAGAGCCTTGTTGGGGCCTGTCCTGAA |
| | (SEQ ID NO: 511) |
| HTT1a_648 | CTCGCGAGGGGAGGCAGAGCCTTGTTGGGGCCTGTCCTGAATTCA |
| | (SEQ ID NO: 512) |
| HTT1a_649 | TCGCGAGGGGAGGCAGAGCCTTGTTGGGGCCTGTCCTGAATTCAC |
| | (SEQ ID NO: 513) |
| HTT1a_650 | CGCGAGGGGAGGCAGAGCCTTGTTGGGGCCTGTCCTGAATTCACC |
| | (SEQ ID NO: 514) |
| HTT1a_652 | CGAGGGGAGGCAGAGCCTTGTTGGGGCCTGTCCTGAATTCACCGA |
| | (SEQ ID NO: 515) |
| HTT1a_658 | GAGGCAGAGCCTTGTTGGGGCCTGTCCTGAATTCACCGAGGGGAG |
| | (SEQ ID NO: 516) |
| HTT1a_659 | AGGCAGAGCCTTGTTGGGGCCTGTCCTGAATTCACCGAGGGGAGT |
| | (SEQ ID NO: 34) |
| HTT1a__486 | GGCGGTAACCCTGCAGCCTGCGGGCCGGCGACACGAACCCCCGGC |
| | (SEQ ID NO: 517) |
| HTT1a__487 | GCGGTAACCCTGCAGCCTGCGGGCCGGCGACACGAACCCCCGGCC |
| | (SEQ ID NO: 518) |
| HTT1a__488 | CGGTAACCCTGCAGCCTGCGGGCCGGCGACACGAACCCCCGGCCC |
| | (SEQ ID NO: 519) |
| HTT1a__489 | GGTAACCCTGCAGCCTGCGGGCCGGCGACACGAACCCCCGGCCCC |
| | (SEQ ID NO: 520) |
| HTT1a__490 | GTAACCCTGCAGCCTGCGGGCCGGCGACACGAACCCCCGGCCCCG |
| | (SEQ ID NO: 521) |
| HTT1a__492 | AACCCTGCAGCCTGCGGGCCGGCGACACGAACCCCCGGCCCCGCA |
| | (SEQ ID NO: 522) |
| HTT1a__493 | ACCCTGCAGCCTGCGGGCCGGCGACACGAACCCCCGGCCCCGCAG |
| | (SEQ ID NO: 523) |
| HTT1a__506 | CGGGCCGGCGACACGAACCCCCGGCCCCGCAGAGACAGAGTGACC |
| | (SEQ ID NO: 524) |
| HTT1a__507 | GGGCCGGCGACACGAACCCCCGGCCCCGCAGAGACAGAGTGACCC |
| | (SEQ ID NO: 525) |
| HTT1a__508 | GGCCGGCGACACGAACCCCCGGCCCCGCAGAGACAGAGTGACCCA |
| | (SEQ ID NO: 526) |
| HTT1a__511 | CGGCGACACGAACCCCCGGCCCCGCAGAGACAGAGTGACCCAGCA |
| | (SEQ ID NO: 527) |
| HTT1a__513 | GCGACACGAACCCCCGGCCCCGCAGAGACAGAGTGACCCAGCAAC |
| | (SEQ ID NO: 528) |
| HTT1a__519 | CGAACCCCCGGCCCCGCAGAGACAGAGTGACCCAGCAACCCAGAG |
| | (SEQ ID NO: 529) |
| HTT1a__520 | GAACCCCCGGCCCCGCAGAGACAGAGTGACCCAGCAACCCAGAGC |
| | (SEQ ID NO: 530) |
| HTT1a__521 | AACCCCCGGCCCCGCAGAGACAGAGTGACCCAGCAACCCAGAGCC |
| | (SEQ ID NO: 531) |
| HTT1a__524 | CCCCGGCCCCGCAGAGACAGAGTGACCCAGCAACCCAGAGCCCAT |
| | (SEQ ID NO: 532) |
| HTT1a__525 | CCCGGCCCCGCAGAGACAGAGTGACCCAGCAACCCAGAGCCCATG |
| | (SEQ ID NO: 533) |
| HTT1a__526 | CCGGCCCCGCAGAGACAGAGTGACCCAGCAACCCAGAGCCCATGA |
| | (SEQ ID NO: 534) |
| HTT1a__529 | GCCCCGCAGAGACAGAGTGACCCAGCAACCCAGAGCCCATGAGGG |
| | (SEQ ID NO: 535) |
| HTT1a__537 | GAGACAGAGTGACCCAGCAACCCAGAGCCCATGAGGGACACCCGC |
| | (SEQ ID NO: 536) |
| HTT1a__538 | AGACAGAGTGACCCAGCAACCCAGAGCCCATGAGGGACACCCGCC |
| | (SEQ ID NO: 537) |
| HTT1a__540 | ACAGAGTGACCCAGCAACCCAGAGCCCATGAGGGACACCCGCCCC |
| | (SEQ ID NO: 538) |
| HTT1a__541 | CAGAGTGACCCAGCAACCCAGAGCCCATGAGGGACACCCGCCCCC |
| | (SEQ ID NO: 539) |
| HTT1a__542 | AGAGTGACCCAGCAACCCAGAGCCCATGAGGGACACCCGCCCCCT |
| | (SEQ ID NO: 540) |
| HTT1a_1638 | TTACCTCTCAGTATTCTATTTCCGATCTGGATGTGTCCCAGATGG |
| | (SEQ ID NO: 541) |
| HTT1a_1639 | TACCTCTCAGTATTCTATTTCCGATCTGGATGTGTCCCAGATGGC |
| | (SEQ ID NO: 542) |
| HTT1a_1640 | ACCTCTCAGTATTCTATTTCCGATCTGGATGTGTCCCAGATGGCA |
| | (SEQ ID NO: 543) |
| HTT1a_1641 | CCTCTCAGTATTCTATTTCCGATCTGGATGTGTCCCAGATGGCAT |
| | (SEQ ID NO: 544) |
| HTT1a_1643 | TCTCAGTATTCTATTTCCGATCTGGATGTGTCCCAGATGGCATTT |
| | (SEQ ID NO: 545) |
| HTT1a_1644 | CTCAGTATTCTATTTCCGATCTGGATGTGTCCCAGATGGCATTTG |
| | (SEQ ID NO: 546) |
| HTT1a_1645 | TCAGTATTCTATTTCCGATCTGGATGTGTCCCAGATGGCATTTGG |
| | (SEQ ID NO: 547) |
| HTT1a_1646 | CAGTATTCTATTTCCGATCTGGATGTGTCCCAGATGGCATTTGGT |
| | (SEQ ID NO: 548) |
| HTT1a_1649 | TATTCTATTTCCGATCTGGATGTGTCCCAGATGGCATTTGGTAAG |
| | (SEQ ID NO: 549) |
| HTT1a_1650 | ATTCTATTTCCGATCTGGATGTGTCCCAGATGGCATTTGGTAAGA |
| | (SEQ ID NO: 550) |
| HTT1a_1651 | TTCTATTTCCGATCTGGATGTGTCCCAGATGGCATTTGGTAAGAA |
| | (SEQ ID NO: 551) |
| HTT1a_1652 | TCTATTTCCGATCTGGATGTGTCCCAGATGGCATTTGGTAAGAAT |
| | (SEQ ID NO: 552) |
| HTT1a_1653 | CTATTTCCGATCTGGATGTGTCCCAGATGGCATTTGGTAAGAATA |
| | (SEQ ID NO: 553) |
| HTT1a_1654 | TATTTCCGATCTGGATGTGTCCCAGATGGCATTTGGTAAGAATAT |
| | (SEQ ID NO: 13) |
| HTT1a_1655 | ATTTCCGATCTGGATGTGTCCCAGATGGCATTTGGTAAGAATATC |
| | (SEQ ID NO: 12) |
| HTT1a_1657 | TTCCGATCTGGATGTGTCCCAGATGGCATTTGGTAAGAATATCTC |
| | (SEQ ID NO: 11) |
| HTT1a_1658 | TCCGATCTGGATGTGTCCCAGATGGCATTTGGTAAGAATATCTCT |
| | (SEQ ID NO: 10) |
| HTT1a_1659 | CCGATCTGGATGTGTCCCAGATGGCATTTGGTAAGAATATCTCTG |
| | (SEQ ID NO: 9) |
| HTT1a_1660 | CGATCTGGATGTGTCCCAGATGGCATTTGGTAAGAATATCTCTGT |
| | (SEQ ID NO: 8) |
| HTT1a_1661 | GATCTGGATGTGTCCCAGATGGCATTTGGTAAGAATATCTCTGTT |
| | (SEQ ID NO: 7) |
| HTT1a_1662 | ATCTGGATGTGTCCCAGATGGCATTTGGTAAGAATATCTCTGTTA |
| | (SEQ ID NO: 6) |
| HTT1a_1663 | TCTGGATGTGTCCCAGATGGCATTTGGTAAGAATATCTCTGTTAA |
| | (SEQ ID NO: 5) |
| HTT1a_1664 | CTGGATGTGTCCCAGATGGCATTTGGTAAGAATATCTCTGTTAAG |
| | (SEQ ID NO: 4) |
| HTT1a_1665 | TGGATGTGTCCCAGATGGCATTTGGTAAGAATATCTCTGTTAAGA |
| | (SEQ ID NO: 3) |
| HTT1a_1666 | GGATGTGTCCCAGATGGCATTTGGTAAGAATATCTCTGTTAAGAC |
| | (SEQ ID NO: 2) |
| HTT1a_1667 | GATGTGTCCCAGATGGCATTTGGTAAGAATATCTCTGTTAAGACT |
| | (SEQ ID NO: 1) |

TABLE 19
20-nucleotide mRNA target HTT-1A regions

| Name | mRNA Target |
|---|---|
| HTT1a_412 | ACUGAGUUUGGGCCCGCUGC |
| | (SEQ ID NO: 554) |
| HTT1a_414 | UGAGUUUGGGCCCGCUGCAG |
| | (SEQ ID NO: 555) |
| HTT1a_418 | UUUGGGCCCGCUGCAGCUCC |
| | (SEQ ID NO: 556) |
| HTT1a_424 | CCCGCUGCAGCUCCCUGUCC |
| | (SEQ ID NO: 557) |
| HTT1a_434 | CUCCCUGUCCCGGCGGGUCC |
| | (SEQ ID NO: 558) |
| HTT1a_447 | CGGGUCCCAGGCUACGGCGG |
| | (SEQ ID NO: 559) |
| HTT1a_449 | GGUCCCAGGCUACGGCGGGG |
| | (SEQ ID NO: 560) |
| HTT1a_452 | CCCAGGCUACGGCGGGGAUG |
| | (SEQ ID NO: 561) |
| HTT1a_453 | CCAGGCUACGGCGGGGAUGG |
| | (SEQ ID NO: 562) |
| HTT1a_459 | UACGGCGGGGAUGGCGGUAA |
| | (SEQ ID NO: 563) |
| HTT1a_460 | ACGGCGGGGAUGGCGGUAAC |
| | (SEQ ID NO: 564) |
| HTT1a_465 | GGGGAUGGCGGUAACCCUGC |
| | (SEQ ID NO: 565) |
| HTT1a_468 | GAUGGCGGUAACCCUGCAGC |
| | (SEQ ID NO: 566) |
| HTT1a_471 | GGCGGUAACCCUGCAGCCUG |
| | (SEQ ID NO: 567) |
| HTT1a_472 | GCGGUAACCCUGCAGCCUGC |
| | (SEQ ID NO: 568) |
| HTT1a_474 | GGUAACCCUGCAGCCUGCGG |
| | (SEQ ID NO: 569) |
| HTT1a_491 | CGGGCCGGCGACACGAACCC |
| | (SEQ ID NO: 570) |
| HTT1a_515 | CCCCGCAGAGACAGAGUGAC |
| | (SEQ ID NO: 571) |
| HTT1a_518 | CGCAGAGACAGAGUGACCCA |
| | (SEQ ID NO: 572) |
| HTT1a_523 | AGACAGAGUGACCCAGCAAC |
| | (SEQ ID NO: 573) |
| HTT1a_539 | CAACCCAGAGCCCAUGAGGG |
| | (SEQ ID NO: 574) |
| HTT1a_546 | GAGCCCAUGAGGGACACCCG |
| | (SEQ ID NO: 575) |
| HTT1a_596 | UCAGCCCCGCUCCCUCACUU |
| | (SEQ ID NO: 576) |
| HTT1a_597 | CAGCCCCGCUCCCUCACUUG |
| | (SEQ ID NO: 577) |
| HTT1a_598 | AGCCCCGCUCCCUCACUUGG |
| | (SEQ ID NO: 578) |
| HTT1a_599 | GCCCCGCUCCCUCACUUGGG |
| | (SEQ ID NO: 579) |
| HTT1a_601 | CCCGCUCCCUCACUUGGGUC |
| | (SEQ ID NO: 580) |
| HTT1a_603 | CGCUCCCUCACUUGGGUCUU |
| | (SEQ ID NO: 581) |
| HTT1a_604 | GCUCCCUCACUUGGGUCUUC |
| | (SEQ ID NO: 582) |
| HTT1a_606 | UCCCUCACUUGGGUCUUCCC |
| | (SEQ ID NO: 583) |
| HTT1a_612 | ACUUGGGUCUUCCCUUGUCC |
| | (SEQ ID NO: 584) |
| HTT1a_615 | UGGGUCUUCCCUUGUCCUCU |
| | (SEQ ID NO: 585) |
| HTT1a_619 | UCUUCCCUUGUCCUCUCGCG |
| | (SEQ ID NO: 586) |
| HTT1a_620 | CUUCCCUUGUCCUCUCGCGA |
| | (SEQ ID NO: 587) |
| HTT1a_621 | UUCCCUUGUCCUCUCGCGAG |
| | (SEQ ID NO: 588) |
| HTT1a_622 | UCCCUUGUCCUCUCGCGAGG |
| | (SEQ ID NO: 589) |
| HTT1a_638 | GAGGGGAGGCAGAGCCUUGU |
| | (SEQ ID NO: 590) |
| HTT1a_639 | AGGGGAGGCAGAGCCUUGUU |
| | (SEQ ID NO: 591) |
| HTT1a_641 | GGGAGGCAGAGCCUUGUUGG |
| | (SEQ ID NO: 592) |
| HTT1a_642 | GGAGGCAGAGCCUUGUUGGG |
| | (SEQ ID NO: 593) |
| HTT1a_643 | GAGGCAGAGCCUUGUUGGGG |
| | (SEQ ID NO: 594) |
| HTT1a_644 | AGGCAGAGCCUUGUUGGGGC |
| | (SEQ ID NO: 595) |
| HTT1a_648 | AGAGCCUUGUUGGGGCCUGU |
| | (SEQ ID NO: 596) |
| HTT1a_649 | GAGCCUUGUUGGGGCCUGUC |
| | (SEQ ID NO: 597) |
| HTT1a_650 | AGCCUUGUUGGGGCCUGUCC |
| | (SEQ ID NO: 598) |
| HTT1a_652 | CCUUGUUGGGGCCUGUCCUG |
| | (SEQ ID NO: 599) |
| HTT1a_658 | UGGGGCCUGUCCUGAAUUCA |
| | (SEQ ID NO: 600) |
| HTT1a_659 | GGGGCCUGUCCUGAAUUCAC |
| | (SEQ ID NO: 601) |
| HTT1a__486 | GCCUGCGGGCCGGCGACACG |
| | (SEQ ID NO: 602) |
| HTT1a__487 | CCUGCGGGCCGGCGACACGA |
| | (SEQ ID NO: 603) |
| HTT1a__488 | CUGCGGGCCGGCGACACGAA |
| | (SEQ ID NO: 604) |
| HTT1a__489 | UGCGGGCCGGCGACACGAAC |
| | (SEQ ID NO: 605) |
| HTT1a__490 | GCGGGCCGGCGACACGAACC |
| | (SEQ ID NO: 606) |
| HTT1a__492 | GGGCCGGCGACACGAACCCC |
| | (SEQ ID NO: 607) |
| HTT1a__493 | GGCCGGCGACACGAACCCCC |
| | (SEQ ID NO: 608) |
| HTT1a__506 | AACCCCCGGCCCCGCAGAGA |
| | (SEQ ID NO: 609) |
| HTT1a__507 | ACCCCCGGCCCCGCAGAGAC |
| | (SEQ ID NO: 610) |
| HTT1a__508 | CCCCCGGCCCCGCAGAGACA |
| | (SEQ ID NO: 611) |
| HTT1a__511 | CCGGCCCCGCAGAGACAGAG |
| | (SEQ ID NO: 612) |
| HTT1a__513 | GGCCCCGCAGAGACAGAGUG |
| | (SEQ ID NO: 613) |
| HTT1a__519 | GCAGAGACAGAGUGACCCAG |
| | (SEQ ID NO: 614) |
| HTT1a__520 | CAGAGACAGAGUGACCCAGC |
| | (SEQ ID NO: 615) |
| HTT1a__521 | AGAGACAGAGUGACCCAGCA |
| | (SEQ ID NO: 616) |
| HTT1a__524 | GACAGAGUGACCCAGCAACC |
| | (SEQ ID NO: 617) |
| HTT1a__525 | ACAGAGUGACCCAGCAACCC |
| | (SEQ ID NO: 618) |
| HTT1a__526 | CAGAGUGACCCAGCAACCCA |
| | (SEQ ID NO: 619) |
| HTT1a__529 | AGUGACCCAGCAACCCAGAG |
| | (SEQ ID NO: 620) |
| HTT1a__537 | AGCAACCCAGAGCCCAUGAG |
| | (SEQ ID NO: 621) |
| HTT1a__538 | GCAACCCAGAGCCCAUGAGG |
| | (SEQ ID NO: 622) |
| HTT1a__540 | AACCCAGAGCCCAUGAGGGA |
| | (SEQ ID NO: 623) |
| HTT1a__541 | ACCCAGAGCCCAUGAGGGAC |
| | (SEQ ID NO: 624) |
| HTT1a__542 | CCCAGAGCCCAUGAGGGACA |
| | (SEQ ID NO: 625) |
| HTT1a_1638 | CUAUUUCCGAUCUGGAUGUG |
| | (SEQ ID NO: 626) |
| HTT1a_1639 | UAUUUCCGAUCUGGAUGUGU |
| | (SEQ ID NO: 627) |
| HTT1a_1640 | AUUUCCGAUCUGGAUGUGUC |
| | (SEQ ID NO: 628) |
| HTT1a_1641 | UUUCCGAUCUGGAUGUGUCC |
| | (SEQ ID NO: 629) |
| HTT1a_1643 | UCCGAUCUGGAUGUGUCCCA |
| | (SEQ ID NO: 630) |
| HTT1a_1644 | CCGAUCUGGAUGUGUCCCAG |
| | (SEQ ID NO: 631) |
| HTT1a_1646 | GAUCUGGAUGUGUCCCAGAU |
| | (SEQ ID NO: 632) |
| HTT1a_1649 | CUGGAUGUGUCCCAGAUGGC |
| | (SEQ ID NO: 633) |
| HTT1a_1650 | UGGAUGUGUCCCAGAUGGCA |
| | (SEQ ID NO: 634) |
| HTT1a_1651 | GGAUGUGUCCCAGAUGGCAU |
| | (SEQ ID NO: 635) |
| HTT1a_1652 | GAUGUGUCCCAGAUGGCAUU |
| | (SEQ ID NO: 636) |
| HTT1a_1653 | AUGUGUCCCAGAUGGCAUUU |
| | (SEQ ID NO: 637) |
| HTT1a_1655 | GUGUCCCAGAUGGCAUUUGG |
| | (SEQ ID NO: 25) |
| HTT1a_1657 | GUCCCAGAUGGCAUUUGGUA |
| | (SEQ ID NO: 24) |
| HTT1a_1658 | UCCCAGAUGGCAUUUGGUAA |
| | (SEQ ID NO: 23) |
| HTT1a_1659 | CCCAGAUGGCAUUUGGUAAG |
| | (SEQ ID NO: 22) |
| HTT1a_1660 | CCAGAUGGCAUUUGGUAAGA |
| | (SEQ ID NO: 21) |
| HTT1a_1661 | CAGAUGGCAUUUGGUAAGAA |
| | (SEQ ID NO: 20) |
| HTT1a_1662 | AGAUGGCAUUUGGUAAGAAU |
| | (SEQ ID NO: 19) |
| HTT1a_1663 | GAUGGCAUUUGGUAAGAAUA |
| | (SEQ ID NO: 18) |
| HTT1a_1664 | AUGGCAUUUGGUAAGAAUAU |
| | (SEQ ID NO: 17) |
| HTT1a_1665 | UGGCAUUUGGUAAGAAUAUC |
| | (SEQ ID NO: 16) |
| HTT1a_1666 | GGCAUUUGGUAAGAAUAUCU |
| | (SEQ ID NO: 15) |
| HTT1a_1667 | GCAUUUGGUAAGAAUAUCUC |
| | (SEQ ID NO: 14) |

TABLE 20
siRNA antisense and sense strand sequences

| Name | Antisense Strand | Sense Strand |
|---|---|---|
| HTT1a_412 | UCAGCGGGCCCAAACUCAGUU | AGUUUGGGCCCGCUGA |
| | (SEQ ID NO: 638) | (SEQ ID NO: 734) |
| HTT1a_414 | UUGCAGCGGGCCCAAACUCAU | UUUGGGCCCGCUGCAA |
| | (SEQ ID NO: 639) | (SEQ ID NO: 735) |
| HTT1a_418 | UGAGCUGCAGCGGGCCCAAAU | GGCCCGCUGCAGCUCA |
| | (SEQ ID NO: 640) | (SEQ ID NO: 736) |
| HTT1a_424 | UGACAGGGAGCUGCAGCGGGU | CUGCAGCUCCCUGUCA |
| | (SEQ ID NO: 641) | (SEQ ID NO: 737) |
| HTT1a_434 | UGACCCGCCGGGACAGGGAGU | CUGUCCCGGCGGGUCA |
| | (SEQ ID NO: 642) | (SEQ ID NO: 738) |
| HTT1a_447 | UCGCCGUAGCCUGGGACCCGU | UCCCAGGCUACGGCGA |
| | (SEQ ID NO: 643) | (SEQ ID NO: 739) |
| HTT1a_449 | UCCCGCCGUAGCCUGGGACCU | CCAGGCUACGGCGGGA |
| | (SEQ ID NO: 644) | (SEQ ID NO: 740) |
| HTT1a_452 | UAUCCCCGCCGUAGCCUGGGU | GGCUACGGCGGGGAUA |
| | (SEQ ID NO: 645) | (SEQ ID NO: 741) |
| HTT1a_453 | UCAUCCCCGCCGUAGCCUGGU | GCUACGGCGGGGAUGA |
| | (SEQ ID NO: 646) | (SEQ ID NO: 742) |
| HTT1a_459 | UUACCGCCAUCCCCGCCGUAU | GCGGGGAUGGCGGUAA |
| | (SEQ ID NO: 647) | (SEQ ID NO: 743) |
| HTT1a_460 | UUUACCGCCAUCCCCGCCGUU | CGGGGAUGGCGGUAAA |
| | (SEQ ID NO: 648) | (SEQ ID NO: 744) |
| HTT1a_465 | UCAGGGUUACCGCCAUCCCCU | AUGGCGGUAACCCUGA |
| | (SEQ ID NO: 649) | (SEQ ID NO: 745) |
| HTT1a_468 | UCUGCAGGGUUACCGCCAUCU | GCGGUAACCCUGCAGA |
| | (SEQ ID NO: 650) | (SEQ ID NO: 746) |
| HTT1a_471 | UAGGCUGCAGGGUUACCGCCU | GUAACCCUGCAGCCUA |
| | (SEQ ID NO: 651) | (SEQ ID NO: 747) |
| HTT1a_472 | UCAGGCUGCAGGGUUACCGCU | UAACCCUGCAGCCUGA |
| | (SEQ ID NO: 652) | (SEQ ID NO: 748) |
| HTT1a_474 | UCGCAGGCUGCAGGGUUACCU | ACCCUGCAGCCUGCGA |
| | (SEQ ID NO: 653) | (SEQ ID NO: 749) |
| HTT1a_491 | UGGUUCGUGUCGCCGGCCCGU | CCGGCGACACGAACCA |
| | (SEQ ID NO: 654) | (SEQ ID NO: 750) |
| HTT1a_515 | UUCACUCUGUCUCUGCGGGGU | GCAGAGACAGAGUGAA |
| | (SEQ ID NO: 655) | (SEQ ID NO: 751) |
| HTT1a_518 | UGGGUCACUCUGUCUCUGCGU | GAGACAGAGUGACCCA |
| | (SEQ ID NO: 656) | (SEQ ID NO: 752) |
| HTT1a_523 | UUUGCUGGGUCACUCUGUCUU | AGAGUGACCCAGCAAA |
| | (SEQ ID NO: 657) | (SEQ ID NO: 753) |
| HTT1a_539 | UCCUCAUGGGCUCUGGGUUGU | CCAGAGCCCAUGAGGA |
| | (SEQ ID NO: 658) | (SEQ ID NO: 754) |
| HTT1a_546 | UGGGUGUCCCUCAUGGGCUCU | CCAUGAGGGACACCCA |
| | (SEQ ID NO: 659) | (SEQ ID NO: 755) |
| HTT1a_596 | UAGUGAGGGAGCGGGGCUGAU | CCCCGCUCCCUCACUA |
| | (SEQ ID NO: 660) | (SEQ ID NO: 756) |
| HTT1a_597 | UAAGUGAGGGAGCGGGGCUGU | CCCGCUCCCUCACUUA |
| | (SEQ ID NO: 661) | (SEQ ID NO: 757) |
| HTT1a_598 | UCAAGUGAGGGAGCGGGGCUU | CCGCUCCCUCACUUGA |
| | (SEQ ID NO: 662) | (SEQ ID NO: 758) |
| HTT1a_599 | UCCAAGUGAGGGAGCGGGGCU | CGCUCCCUCACUUGGA |
| | (SEQ ID NO: 663) | (SEQ ID NO: 759) |
| HTT1a_601 | UACCCAAGUGAGGGAGCGGGU | CUCCCUCACUUGGGUA |
| | (SEQ ID NO: 664) | (SEQ ID NO: 760) |
| HTT1a_603 | UAGACCCAAGUGAGGGAGCGU | CCCUCACUUGGGUCUA |
| | (SEQ ID NO: 665) | (SEQ ID NO: 761) |
| HTT1a_604 | UAAGACCCAAGUGAGGGAGCU | CCUCACUUGGGUCUUA |
| | (SEQ ID NO: 666) | (SEQ ID NO: 762) |
| HTT1a_606 | UGGAAGACCCAAGUGAGGGAU | UCACUUGGGUCUUCCA |
| | (SEQ ID NO: 667) | (SEQ ID NO: 763) |
| HTT1a_612 | UGACAAGGGAAGACCCAAGUU | GGGUCUUCCCUUGUCA |
| | (SEQ ID NO: 668) | (SEQ ID NO: 764) |
| HTT1a_615 | UGAGGACAAGGGAAGACCCAU | UCUUCCCUUGUCCUCA |
| | (SEQ ID NO: 669) | (SEQ ID NO: 765) |
| HTT1a_619 | UGCGAGAGGACAAGGGAAGAU | CCCUUGUCCUCUCGCA |
| | (SEQ ID NO: 670) | (SEQ ID NO: 766) |
| HTT1a_620 | UCGCGAGAGGACAAGGGAAGU | CCUUGUCCUCUCGCGA |
| | (SEQ ID NO: 671) | (SEQ ID NO: 767) |
| HTT1a_621 | UUCGCGAGAGGACAAGGGAAU | CUUGUCCUCUCGCGAA |
| | (SEQ ID NO: 672) | (SEQ ID NO: 768) |
| HTT1a_622 | UCUCGCGAGAGGACAAGGGAU | UUGUCCUCUCGCGAGA |
| | (SEQ ID NO: 673) | (SEQ ID NO: 769) |
| HTT1a_638 | UCAAGGCUCUGCCUCCCCUCU | GGAGGCAGAGCCUUGA |
| | (SEQ ID NO: 674) | (SEQ ID NO: 770) |
| HTT1a_639 | UACAAGGCUCUGCCUCCCCUU | GAGGCAGAGCCUUGUA |
| | (SEQ ID NO: 675) | (SEQ ID NO: 771) |
| HTT1a_641 | UCAACAAGGCUCUGCCUCCCU | GGCAGAGCCUUGUUGA |
| | (SEQ ID NO: 676) | (SEQ ID NO: 772) |
| HTT1a_642 | UCCAACAAGGCUCUGCCUCCU | GCAGAGCCUUGUUGGA |
| | (SEQ ID NO: 677) | (SEQ ID NO: 773) |
| HTT1a_643 | UCCCAACAAGGCUCUGCCUCU | CAGAGCCUUGUUGGGA |
| | (SEQ ID NO: 678) | (SEQ ID NO: 774) |
| HTT1a_644 | UCCCCAACAAGGCUCUGCCUU | AGAGCCUUGUUGGGGA |
| | (SEQ ID NO: 679) | (SEQ ID NO: 775) |
| HTT1a_648 | UCAGGCCCCAACAAGGCUCUU | CCUUGUUGGGGCCUGA |
| | (SEQ ID NO: 680) | (SEQ ID NO: 776) |
| HTT1a_649 | UACAGGCCCCAACAAGGCUCU | CUUGUUGGGGCCUGUA |
| | (SEQ ID NO: 681) | (SEQ ID NO: 777) |
| HTT1a_650 | UGACAGGCCCCAACAAGGCUU | UUGUUGGGGCCUGUCA |
| | (SEQ ID NO: 682) | (SEQ ID NO: 778) |
| HTT1a_652 | UAGGACAGGCCCCAACAAGGU | GUUGGGGCCUGUCCUA |
| | (SEQ ID NO: 683) | (SEQ ID NO: 779) |
| HTT1a_658 | UGAAUUCAGGACAGGCCCCAU | GCCUGUCCUGAAUUCA |
| | (SEQ ID NO: 684) | (SEQ ID NO: 780) |
| HTT1a_659 | UUGAAUUCAGGACAGGCCCCU | CCUGUCCUGAAUUCAA |
| | (SEQ ID NO: 685) | (SEQ ID NO: 781) |
| HTT1a__486 | UGUGUCGCCGGCCCGCAGGCU | GCGGGCCGGCGACACA |
| | (SEQ ID NO: 686) | (SEQ ID NO: 782) |
| HTT1a__487 | UCGUGUCGCCGGCCCGCAGGU | CGGGCCGGCGACACGA |
| | (SEQ ID NO: 687) | (SEQ ID NO: 783) |
| HTT1a__488 | UUCGUGUCGCCGGCCCGCAGU | GGGCCGGCGACACGAA |
| | (SEQ ID NO: 688) | (SEQ ID NO: 784) |
| HTT1a__489 | UUUCGUGUCGCCGGCCCGCAU | GGCCGGCGACACGAAA |
| | (SEQ ID NO: 689) | (SEQ ID NO: 785) |
| HTT1a__490 | UGUUCGUGUCGCCGGCCCGCU | GCCGGCGACACGAACA |
| | (SEQ ID NO: 690) | (SEQ ID NO: 786) |
| HTT1a__492 | UGGGUUCGUGUCGCCGGCCCU | CGGCGACACGAACCCA |
| | (SEQ ID NO: 691) | (SEQ ID NO: 787) |
| HTT1a__493 | UGGGGUUCGUGUCGCCGGCCU | GGCGACACGAACCCCA |
| | (SEQ ID NO: 692) | (SEQ ID NO: 788) |
| HTT1a__506 | UCUCUGCGGGGCCGGGGGUUU | CCCGGCCCCGCAGAGA |
| | (SEQ ID NO: 693) | (SEQ ID NO: 789) |
| HTT1a__507 | UUCUCUGCGGGGCCGGGGGUU | CCGGCCCCGCAGAGAA |
| | (SEQ ID NO: 694) | (SEQ ID NO: 790) |
| HTT1a__508 | UGUCUCUGCGGGGCCGGGGGU | CGGCCCCGCAGAGACA |
| | (SEQ ID NO: 695) | (SEQ ID NO: 791) |
| HTT1a__511 | UUCUGUCUCUGCGGGGCCGGU | CCCCGCAGAGACAGAA |
| | (SEQ ID NO: 696) | (SEQ ID NO: 792) |
| HTT1a__513 | UACUCUGUCUCUGCGGGGCCU | CCGCAGAGACAGAGUA |
| | (SEQ ID NO: 697) | (SEQ ID NO: 793) |
| HTT1a__519 | UUGGGUCACUCUGUCUCUGCU | AGACAGAGUGACCCAA |
| | (SEQ ID NO: 698) | (SEQ ID NO: 794) |
| HTT1a__520 | UCUGGGUCACUCUGUCUCUGU | GACAGAGUGACCCAGA |
| | (SEQ ID NO: 699) | (SEQ ID NO: 795) |
| HTT1a__521 | UGCUGGGUCACUCUGUCUCUU | ACAGAGUGACCCAGCA |
| | (SEQ ID NO: 700) | (SEQ ID NO: 796) |
| HTT1a__524 | UGUUGCUGGGUCACUCUGUCU | GAGUGACCCAGCAACA |
| | (SEQ ID NO: 701) | (SEQ ID NO: 797) |
| HTT1a__525 | UGGUUGCUGGGUCACUCUGUU | AGUGACCCAGCAACCA |
| | (SEQ ID NO: 702) | (SEQ ID NO: 798) |
| HTT1a__526 | UGGGUUGCUGGGUCACUCUGU | GUGACCCAGCAACCCA |
| | (SEQ ID NO: 703) | (SEQ ID NO: 799) |
| HTT1a__529 | UUCUGGGUUGCUGGGUCACUU | ACCCAGCAACCCAGAA |
| | (SEQ ID NO: 704) | (SEQ ID NO: 800) |
| HTT1a__537 | UUCAUGGGCUCUGGGUUGCUU | ACCCAGAGCCCAUGAA |
| | (SEQ ID NO: 705) | (SEQ ID NO: 801) |
| HTT1a__538 | UCUCAUGGGCUCUGGGUUGCU | CCCAGAGCCCAUGAGA |
| | (SEQ ID NO: 706) | (SEQ ID NO: 802) |
| HTT1a__540 | UCCCUCAUGGGCUCUGGGUUU | CAGAGCCCAUGAGGGA |
| | (SEQ ID NO: 707) | (SEQ ID NO: 803) |
| HTT1a__541 | UUCCCUCAUGGGCUCUGGGUU | AGAGCCCAUGAGGGAA |
| | (SEQ ID NO: 708) | (SEQ ID NO: 804) |
| HTT1a__542 | UGUCCCUCAUGGGCUCUGGGU | GAGCCCAUGAGGGACA |
| | (SEQ ID NO: 709) | (SEQ ID NO: 805) |
| HTT1a_1638 | UACAUCCAGAUCGGAAAUAGU | UUCCGAUCUGGAUGUA |
| | (SEQ ID NO: 710) | (SEQ ID NO: 806) |
| HTT1a_1639 | UCACAUCCAGAUCGGAAAUAU | UCCGAUCUGGAUGUGA |
| | (SEQ ID NO: 711) | (SEQ ID NO: 807) |
| HTT1a_1640 | UACACAUCCAGAUCGGAAAUU | CCGAUCUGGAUGUGUA |
| | (SEQ ID NO: 712) | (SEQ ID NO: 808) |
| HTT1a_1641 | UGACACAUCCAGAUCGGAAAU | CGAUCUGGAUGUGUCA |
| | (SEQ ID NO: 713) | (SEQ ID NO: 809) |
| HTT1a_1643 | UGGGACACAUCCAGAUCGGAU | AUCUGGAUGUGUCCCA |
| | (SEQ ID NO: 714) | (SEQ ID NO: 810) |
| HTT1a_1644 | UUGGGACACAUCCAGAUCGGU | UCUGGAUGUGUCCCAA |
| | (SEQ ID NO: 715) | (SEQ ID NO: 811) |
| HTT1a_1646 | UUCUGGGACACAUCCAGAUCU | UGGAUGUGUCCCAGAA |
| | (SEQ ID NO: 716) | (SEQ ID NO: 812) |
| HTT1a_1649 | UCCAUCUGGGACACAUCCAGU | AUGUGUCCCAGAUGGA |
| | (SEQ ID NO: 717) | (SEQ ID NO: 813) |
| HTT1a_1650 | UGCCAUCUGGGACACAUCCAU | UGUGUCCCAGAUGGCA |
| | (SEQ ID NO: 718) | (SEQ ID NO: 814) |
| HTT1a_1651 | UUGCCAUCUGGGACACAUCCU | GUGUCCCAGAUGGCAA |
| | (SEQ ID NO: 719) | (SEQ ID NO: 815) |
| HTT1a_1652 | UAUGCCAUCUGGGACACAUCU | UGUCCCAGAUGGCAUA |
| | (SEQ ID NO: 720) | (SEQ ID NO: 816) |
| HTT1a_1653 | UAAUGCCAUCUGGGACACAUU | GUCCCAGAUGGCAUUA |
| | (SEQ ID NO: 721) | (SEQ ID NO: 817) |
| HTT1a_1655 | UCAAAUGCCAUCUGGGACACU | CCCAGAUGGCAUUUGA |
| | (SEQ ID NO: 722) | (SEQ ID NO: 818) |
| HTT1a_1657 | UACCAAAUGCCAUCUGGGACU | CAGAUGGCAUUUGGUA |
| | (SEQ ID NO: 723) | (SEQ ID NO: 819) |
| HTT1a_1658 | UUACCAAAUGCCAUCUGGGAU | AGAUGGCAUUUGGUAA |
| | (SEQ ID NO: 724) | (SEQ ID NO: 820) |
| HTT1a_1659 | UUUACCAAAUGCCAUCUGGGU | GAUGGCAUUUGGUAAA |
| | (SEQ ID NO: 725) | (SEQ ID NO: 821) |
| HTT1a_1660 | UCUUACCAAAUGCCAUCUGGU | AUGGCAUUUGGUAAGA |
| | (SEQ ID NO: 726) | (SEQ ID NO: 822) |
| HTT1a_1661 | UUCUUACCAAAUGCCAUCUGU | UGGCAUUUGGUAAGAA |
| | (SEQ ID NO: 727) | (SEQ ID NO: 823) |
| HTT1a_1662 | UUUCUUACCAAAUGCCAUCUU | GGCAUUUGGUAAGAAA |
| | (SEQ ID NO: 728) | (SEQ ID NO: 824) |
| HTT1a_1663 | UAUUCUUACCAAAUGCCAUCU | GCAUUUGGUAAGAAUA |
| | (SEQ ID NO: 729) | (SEQ ID NO: 825) |
| HTT1a_1664 | UUAUUCUUACCAAAUGCCAUU | CAUUUGGUAAGAAUAA |
| | (SEQ ID NO: 730) | (SEQ ID NO: 826) |
| HTT1a_1665 | UAUAUUCUUACCAAAUGCCAU | AUUUGGUAAGAAUAUA |
| | (SEQ ID NO: 731) | (SEQ ID NO: 827) |
| HTT1a_1666 | UGAUAUUCUUACCAAAUGCCU | UUUGGUAAGAAUAUCA |
| | (SEQ ID NO: 732) | (SEQ ID NO: 828) |
| HTT1a_1667 | UAGAUAUUCUUACCAAAUGCU | UUGGUAAGAAUAUCUA |
| | (SEQ ID NO: 733) | (SEQ ID NO: 829) |

TABLE 21
siRNA antisense and sense strand sequences with chemical
modification patterns

| Name | Antisense Strand with chemistry | Sense Strand with chemistry |
|---|---|---|
| HTT1a_412 | P(mU)#(fC)#(mA)(fG)(fC)(fG)(mG)(fG)(mC)(fC)(mC) | (mA)#(mG)#(mU)(fU)(mU)(fG) |
| | (fA)(mA)(fA)#(mC)#(fU)#(mC)#(mA)#(mG)#(fU)# | (mG)(fG)(mC)(fC)(mC)(mG)(mC) |
| | (mU) (SEQ ID NO: 830) | (fU)#(mG)#(mA)-TegChol (SEQ |
| | | ID NO: 926) |
| HTT1a_414 | P(mU)#(fU)#(mG)(fC)(fA)(fG)(mC)(fG)(mG)(fG)(mC) | (mU)#(mU)#(mU)(fG)(mG)(fG) |
| | (fC)(mC)(fA)#(mA)#(fA)#(mC)#(mU)#(mC)#(fA)# | (mC)(fC)(mC)(fG)(mC)(mU)(mG) |
| | (mU) (SEQ ID NO: 831) | (fC)#(mA)#(mA)-TegChol (SEQ |
| | | ID NO: 927) |
| HTT1a_418 | P(mU)#(fG)#(mA)(fG)(fC)(fU)(mG)(fC)(mA)(fG)(mC) | (mG)#(mG)#(mC)(fC)(mC)(fG) |
| | (fG)(mG)(fG)#(mC)#(fC)#(mC)#(mA)#(mA)#(fA)# | (mC)(fU)(mG)(fC)(mA)(mG)(mC) |
| | (mU) (SEQ ID NO: 832) | (fU)#(mC)#(mA)-TegChol (SEQ |
| | | ID NO: 928) |
| HTT1a_424 | P(m)#(fG)#(mA)(fC)(fA)(fG)(mG)(fG)(mA)(fG)(mC) | (mC)#(mU)#(mG)(fC)(mA)(fG) |
| | (fU)(mG)(fC)#(mA)#(fG)#(mC)#(mG)#(mG)#(fG)# | (mC)(fU)(mC)(fC)(mC)(mU)(mG) |
| | (mU) (SEQ ID NO: 833) | (fU)#(mC)#(mA)-TegChol (SEQ |
| | | ID NO: 929) |
| HTT1a_434 | P(mU)#(fG)#(mA)(fC)(fC)(fC)(mG)(fC)(mC)(fG)(mG) | (mC)#(mU)#(mG)(fU)(mC)(fC) |
| | (fG)(mA)(fC)#(mA)#(fG)#(mG)#(mG)#(mA)#(fG)# | (mC)(fG)(mG)(fC)(mG)(mG)(mG) |
| | (mU) (SEQ ID NO: 834) | (fU)#(mC)#(mA)-TegChol (SEQ |
| | | ID NO: 930) |
| HTT1a_447 | P(mU)#(fC)#(mG)(fC)(fC)(fG)(mU)(fA)(mG)(fC)(mC) | (mU)#(mC)#(mC)(fC)(mA)(fG) |
| | (fU)(mG)(fG)#(mG)#(fA)#(mC)#(mC)#(mC)#(fG)# | (mG)(fC)(mU)(fA)(mC)(mG)(mG) |
| | (mU) (SEQ ID NO: 835) | (fC)#(mG)#(mA)-TegChol (SEQ |
| | | ID NO: 931) |
| HTT1a_449 | P(mU)#(fC)#(mC)(fC)(fG)(fC)(mC)(fG)(mU)(fA)(mG) | (mC)#(mC)#(mA)(fG)(mG)(fC) |
| | (fC)(mC)(fU)#(mG)#(fG)#(mG)#(mA)#(mC)#(fC)# | (mU)(fA)(mC)(fG)(mG)(mC)(mG) |
| | (mU) (SEQ ID NO: 836) | (fG)#(mG)#(mA)-TegChol (SEQ |
| | | ID NO: 932) |
| HTT1a_452 | P(mU)#(fA)#(mU)(fC)(fC)(fC)(mC)(fG)(mC)(fC)(mG) | (mG)#(mG)#(mC)(fU)(mA)(fC) |
| | (fU)(mA)(fG)#(mC)#(fC)#(mU)#(mG)#(mG)#(fG)# | (mG)(fG)(mC)(fG)(mG)(mG)(mG) |
| | (mU) (SEQ ID NO: 837) | (fA)#(mU)#(mA)-TegChol (SEQ |
| | | ID NO: 933) |
| HTT1a_453 | P(mU)#(fC)#(mA)(fU)(fC)(fC)(mC)(fC)(mG)(fC)(mC) | (mG)#(mC)#(mU)(fA)(mC)(fG) |
| | (fG)(mU)(fA)#(mG)#(fC)#(mC)#(mU)#(mG)#(fG)# | (mG)(fC)(mG)(fG)(mG)(mG)(mA) |
| | (mU) (SEQ ID NO: 838) | (fU)#(mG)#(mA)-TegChol (SEQ |
| | | ID NO: 934) |
| HTT1a_459 | P(mU)#(fU)#(mA)(fC)(fC)(fG)(mC)(fC)(mA)(fU)(mC) | (mG)#(mC)#(mG)(fG)(mG)(fG) |
| | (fC)(mC)(fC)#(mG)#(fC)#(mC)#(mG)#(mU)#(fA)# | (mA)(fU)(mG)(fG)(mC)(mG)(mG) |
| | (mU) (SEQ ID NO: 839) | (fU)#(mA)#(mA)-TegChol (SEQ |
| | | ID NO: 935) |
| HTT1a_460 | P(mU)#(fU)#(mU)(fA)(fC)(fC)(mG)(fC)(mC)(fA)(mU) | (mC)#(mG)#(mG)(fG)(mG)(fA) |
| | (fC)(mC)(fC)#(mC)#(fG)#(mC)#(mC)#(mG)#(fU)# | (mU)(fG)(mG)(fC)(mG)(mG)(mU) |
| | (mU) (SEQ ID NO: 840) | (fA)#(mA)#(mA)-TegChol (SEQ |
| | | ID NO: 936) |
| HTT1a_465 | P(mU)#(fC)#(mA)(fG)(fG)(fG)(mU)(fU)(mA)(fC)(mC) | (mA)#(mU)#(mG)(fG)(mC)(fG) |
| | (fG)(mC)(fC)#(mA)#(fU)#(mC)#(mC)#(mC)#(fC)# | (mG)(fU)(mA)(fA)(mC)(mC)(mC) |
| | (mU) (SEQ ID NO: 841) | (fU)#(mG)#(mA)-TegChol (SEQ |
| | | ID NO: 937) |
| HTT1a_468 | P(mU)#(fC)#(mU)(fG)(fC)(fA)(mG)(fG)(mG)(fU)(mU) | (mG)#(mC)#(mG)(fG)(mU)(fA) |
| | (fA)(mC)(fC)#(mG)#(fC)#(mC)#(mA)#(mU)#(fC)# | (mA)(fC)(mC)(fC)(mU)(mG)(mC) |
| | (mU) (SEQ ID NO: 842) | (fA)#(mG)#(mA)-TegChol (SEQ |
| | | ID NO: 938) |
| HTT1a_471 | P(mU)#(fA)#(mG)(fG)(fC)(fU)(mG)(fC)(mA)(fG)(mG) | (mG)#(mU)#(mA)(fA)(mC)(fC) |
| | (fG)(mU)(fU)#(mA)#(fC)#(mC)#(mG)#(mC)#(fC)# | (mC)(fU)(mG)(fC)(mA)(mG)(mC) |
| | (mU) (SEQ ID NO: 843) | (fC)#(mU)#(mA)-TegChol (SEQ |
| | | ID NO: 939) |
| HTT1a_472 | P(mU)#(fC)#(mA)(fG)(fG)(fC)(mU)(fG)(mC)(fA)(mG) | (mU)#(mA)#(mA)(fC)(mC)(fC) |
| | (fG)(mG)(fU)#(mU)#(fA)#(mC)#(mC)#(mG)#(fC)# | (mU)(fG)(mC)(fA)(mG)(mC)(mC) |
| | (mU) (SEQ ID NO: 844) | (fU)#(mG)#(mA)-TegChol (SEQ |
| | | ID NO: 940) |
| HTT1a_474 | P(mU)#(fC)#(mG)(fC)(fA)(fG)(mG)(fC)(mU)(fG)(mC) | (mA)#(mC)#(mC)(fC)(mU)(fG) |
| | (fA)(mG)(fG)#(mG)#(fU)#(mU)#(mA)#(mC)#(fC)# | (mC)(fA)(mG)(fC)(mC)(mU)(mG) |
| | (mU) (SEQ ID NO: 845) | (fC)#(mG)#(mA)-TegChol (SEQ |
| | | ID NO: 941) |
| HTT1a_491 | P(mU)#(fG)#(mG)(fU)(fU)(fC)(mG)(fU)(mG)(fU)(mC) | (mC)#(mC)#(mG)(fG)(mC)(fG) |
| | (fG)(mC)(fC)#(mG)#(fG)#(mC)#(mC)#(mC)#(fG)# | (mA)(fC)(mA)(fC)(mG)(mA)(mA) |
| | (mU) (SEQ ID NO: 846) | (fC)#(mC)#(mA)-TegChol (SEQ |
| | | ID NO: 942) |
| HTT1a_515 | P(mU)#(fU)#(mC)(fA)(fC)(fU)(mC)(fU)(mG)(fU)(mC) | (mG)#(mC)#(mA)(fG)(mA)(fG) |
| | (fU)(mC)(fU)#(mG)#(fC)#(mG)#(mG)#(mG)#(fG)# | (mA)(fC)(mA)(fG)(mA)(mG)(mU) |
| | (mU) (SEQ ID NO: 847) | (fG)#(mA)#(mA)-TegChol (SEQ |
| | | ID NO: 943) |
| HTT1a_518 | P(mU)#(fG)#(mG)(fG)(fU)(fC)(mA)(fC)(mU)(fC)(mU) | (mG)#(mA)#(mG)(fA)(mC)(fA) |
| | (fG)(mU)(fC)#(mU)#(fC)#(mU)#(mG)#(mC)#(fG)# | (mG)(fA)(mG)(fU)(mG)(mA)(mC) |
| | (mU) (SEQ ID NO: 848) | (fC)#(mC)#(mA)-TegChol (SEQ |
| | | ID NO: 944) |
| HTT1a_523 | P(mU)#(fU)#(mU)(fG)(fC)(fU)(mG)(fG)(mG)(fU)(mC) | (mA)#(mG)#(mA)(fG)(mU)(fG) |
| | (fA)(mC)(fU)#(mC)#(fU)#(mG)#(mU)#(mC)#(fU)# | (mA)(fC)(mC)(fC)(mA)(mG)(mC) |
| | (mU) (SEQ ID NO: 849) | (fA)#(mA)#(mA)-TegChol (SEQ |
| | | ID NO: 945) |
| HTT1a_539 | P(mU)#(fC)#(mC)(fU)(fC)(fA)(mU)(fG)(mG)(fG)(mC) | (mC)#(mC)#(mA)(fG)(mA)(fG) |
| | (fU)(mC)(fU)#(mG)#(fG)#(mG)#(mU)#(mU)#(fG)# | (mC)(fC)(mC)(fA)(mU)(mG)(mA) |
| | (mU) (SEQ ID NO: 850) | (fG)#(mG)#(mA)-TegChol (SEQ |
| | | ID NO: 946) |
| HTT1a_546 | P(mU)#(fG)#(mG)(fG)(fU)(fG)(mU)(fC)(mC)(fC)(mU) | (mC)#(mC)#(mA)(fU)(mG)(fA) |
| | (fC)(mA)(fU)#(mG)#(fG)#(mG)#(mC)#(mU)#(fC)# | (mG)(fG)(mG)(fA)(mC)(mA)(mC) |
| | (mU) (SEQ ID NO: 851) | (fC)#(mC)#(mA)-TegChol (SEQ |
| | | ID NO: 947) |
| HTT1a_596 | P(mU)#(fA)#(mG)(fU)(fG)(fA)(mG)(fG)(mG)(fA)(mG) | (mC)#(mC)#(mC)(fC)(mG)(fC)(mU) |
| | (fC)(mG)(fG)#(mG)#(fG)#(mC)#(mU)#(mG)#(fA)# | (fC)(mC)(fC)(mU)(mC)(mA)(fC) |
| | (mU) (SEQ ID NO: 852) | #(mU)#(mA)-TegChol (SEQ ID |
| | | NO: 948) |
| HTT1a_597 | P(mU)#(fA)#(mA)(fG)(fU)(fG)(mA)(fG)(mG)(fG)(mA) | (mC)#(mC)#(mC)(fG)(mC)(fU) |
| | (fG)(mC)(fG)#(mG)#(fG)#(mG)#(mC)#(mU)#(fG)# | (mC)(fC)(mC)(fU)(mC)(mA)(mC) |
| | (mU) (SEQ ID NO: 853) | (fU)#(mU)#(mA)-TegChol (SEQ |
| | | ID NO: 949) |
| HTT1a_598 | P(mU)#(fC)#(mA)(fA)(fG)(fU)(mG)(fA)(mG)(fG)(mG) | (mC)#(mC)#(mG)(fC)(mU)(fC) |
| | (fA)(mG)(fC)#(mG)#(fG)#(mG)#(mG)#(mC)#(fU)# | (mC)(fC)(mU)(fC)(mA)(mC)(mU) |
| | (mU) (SEQ ID NO: 854) | (fU)#(mG)#(mA)-TegChol (SEQ |
| | | ID NO: 950) |
| HTT1a_599 | P(mU)#(fC)#(mC)(fA)(fA)(fG)(mU)(fG)(mA)(fG)(mG) | (mC)#(mG)#(mC)(fU)(mC)(fC) |
| | (fG)(mA)(fG)#(mC)#(fG)#(mG)#(mG)#(mG)#(fC)# | (mC)(fU)(mC)(fA)(mC)(mU)(mU) |
| | (mU) (SEQ ID NO: 855) | (fG)#(mG)#(mA)-TegChol (SEQ |
| | | ID NO: 951) |
| HTT1a_601 | P(mU)#(fA)#(mC)(fC)(fC)(fA)(mA)(fG)(mU)(fG)(mA) | (mC)#(mU)#(mC)(fC)(mC)(fU) |
| | (fG)(mG)(fG)#(mA)#(fG)#(mC)#(mG)#(mG)#(fG)# | (mC)(fA)(mC)(fU)(mU)(mG)(mG) |
| | (mU) (SEQ ID NO: 856) | (fG)#(mU)#(mA)-TegChol (SEQ |
| | | ID NO: 952) |
| HTT1a_603 | P(mU)#(fA)#(mG)(fA)(fC)(fC)(mC)(fA)(mA)(fG)(mU) | (mC)#(mC)#(mC)(fU)(mC)(fA) |
| | (fG)(mA)(fG)#(mG)#(fG)#(mA)#(mG)#(mC)#(fG)# | (mC)(fU)(mU)(fG)(mG)(mG)(mU) |
| | (mU) (SEQ ID NO: 857) | (fC)#(mU)#(mA)-TegChol (SEQ |
| | | ID NO: 953) |
| HTT1a_604 | P(mU)#(fA)#(mA)(fG)(fA)(fC)(mC)(fC)(mA)(fA)(mG) | (mC)#(mC)#(mU)(fC)(mA)(fC) |
| | (fU)(mG)(fA)#(mG)#(fG)#(mG)#(mA)#(mG)#(fC)# | (mU)(fU)(mG)(fG)(mG)(mU)(mC) |
| | (mU) (SEQ ID NO: 858) | (fU)#(mU)#(mA)-TegChol (SEQ |
| | | ID NO: 954) |
| HTT1a_606 | P(mU)#(fG)#(mG)(fA)(fA)(fG)(mA)(fC)(mC)(fC)(mA) | (mU)#(mC)#(mA)(fC)(mU)(fU) |
| | (fA)(mG)(fU)#(mG)#(fA)#(mG)#(mG)#(mG)#(fA)# | (mG)(fG)(mG)(fU)(mC)(mU)(mU) |
| | (mU) (SEQ ID NO: 859) | (fC)#(mC)#(mA)-TegChol (SEQ |
| | | ID NO: 955) |
| HTT1a_612 | P(mU)#(fG)#(mA)(fC)(fA)(fA)(mG)(fG)(mG)(fA)(mA) | (mG)#(mG)#(mG)(fU)(mC)(fU) |
| | (fG)(mA)(fC)#(mC)#(fC)#(mA)#(mA)#(mG)#(fU)# | (mU)(fC)(mC)(fC)(mU)(mU)(mG) |
| | (mU) (SEQ ID NO: 860) | (fU)#(mC)#(mA)-TegChol (SEQ |
| | | ID NO: 956) |
| HTT1a_615 | P(mU)#(fG)#(mA)(fG)(fG)(fA)(mC)(fA)(mA)(fG)(mG) | (mU)#(mC)#(mU)(fU)(mC)(fC) |
| | (fG)(mA)(fA)#(mG)#(fA)#(mC)#(mC)#(mC)#(fA)# | (mC)(fU)(mU)(fG)(mU)(mC)(mC) |
| | (mU) (SEQ ID NO: 861) | (fU)#(mC)#(mA)-TegChol (SEQ |
| | | ID NO: 957) |
| HTT1a_619 | P(mU)#(fG)#(mC)(fG)(fA)(fG)(mA)(fG)(mG)(fA)(mC) | (mC)#(mC)#(mC)(fU)(mU)(fG) |
| | (fA)(mA)(fG)#(mG)#(fG)#(mA)#(mA)#(mG)#(fA)# | (mU)(fC)(mC)(fU)(mC)(mU)(mC) |
| | (mU) (SEQ ID NO: 862) | (fG)#(mC)#(mA)-TegChol (SEQ |
| | | ID NO: 958) |
| HTT1a_620 | P(mU)#(fC)#(mG)(fC)(fG)(fA)(mG)(fA)(mG)(fG)(mA) | (mC)#(mC)#(mU)(fU)(mG)(fU) |
| | (fC)(mA)(fA)#(mG)#(fG)#(mG)#(mA)#(mA)#(fG)# | (mC)(fC)(mU)(fC)(mU)(mC)(mG) |
| | (mU) (SEQ ID NO: 863) | (fC)#(mG)#(mA)-TegChol (SEQ |
| | | ID NO: 959) |
| HTT1a_621 | P(mU)#(fU)#(mC)(fG)(fC)(fG)(mA)(fG)(mA)(fG)(mG) | (mC)#(mU)#(mU)(fG)(mU)(fC) |
| | (fA)(mC)(fA)#(mA)#(fG)#(mG)#(mG)#(mA)#(fA)# | (mC)(fU)(mC)(fU)(mC)(mG)(mC) |
| | (mU) (SEQ ID NO: 864) | (fG)#(mA)#(mA)-TegChol (SEQ |
| | | ID NO: 960) |
| HTT1a_622 | P(mU)#(fC)#(mU)(fC)(fG)(fC)(mG)(fA)(mG)(fA)(mG) | (mU)#(mU)#(mG)(fU)(mC)(fC) |
| | (fG)(mA)(fC)#(mA)#(fA)#(mG)#(mG)#(mG)#(fA)# | (mU)(fC)(mU)(fC)(mG)(mC)(mG) |
| | (mU) (SEQ ID NO: 865) | (fA)#(mG)#(mA)-TegChol (SEQ |
| | | ID NO: 961) |
| HTT1a_638 | P(mU)#(fC)#(mA)(fA)(fG)(fG)(mC)(fU)(mC)(fU)(mG) | (mG)#(mG)#(mA)(fG)(mG)(fC) |
| | (fC)(mC)(fU)#(mC)#(fC)#(mC)#(mC)#(mU)#(fC)# | (mA)(fG)(mA)(fG)(mC)(mC)(mU) |
| | (mU) (SEQ ID NO: 866) | (fU)#(mG)#(mA)-TegChol (SEQ |
| | | ID NO: 962) |
| HTT1a_639 | P(mU)#(fA)#(mC)(fA)(fA)(fG)(mG)(fC)(mU)(fC)(mU) | (mG)#(mA)#(mG)(fG)(mC)(fA) |
| | (fG)(mC)(fC)#(mU)#(fC)#(mC)#(mC)#(mC)#(fU)# | (mG)(fA)(mG)(fC)(mC)(mU)(mU) |
| | (mU) (SEQ ID NO: 867) | (fG)#(mU)#(mA)-TegChol (SEQ |
| | | ID NO: 963) |
| HTT1a_641 | P(mU)#(fC)#(mA)(fA)(fC)(fA)(mA)(fG)(mG)(fC)(mU) | (mG)#(mG)#(mC)(fA)(mG)(fA) |
| | (fC)(mU)(fG)#(mC)#(fC)#(mU)#(mC)#(mC)#(fC)# | (mG)(fC)(mC)(fU)(mU)(mG)(mU) |
| | (mU) (SEQ ID NO: 868) | (fU)#(mG)#(mA)-TegChol (SEQ |
| | | ID NO: 964) |
| HTT1a_642 | P(mU)#(fC)#(mC)(fA)(fA)(fC)(mA)(fA)(mG)(fG)(mC) | (mG)#(mC)#(mA)(fG)(mA)(fG) |
| | (fU)(mC)(fU)#(mG)#(fC)#(mC)#(mU)#(mC)#(fC)# | (mC)(fC)(mU)(fU)(mG)(mU)(mU) |
| | (mU) (SEQ ID NO: 869) | (fG)#(mG)#(mA)-TegChol (SEQ |
| | | ID NO: 965) |
| HTT1a_643 | P(mU)#(fC)#(mC)(fC)(fA)(fA)(mC)(fA)(mA)(fG)(mG) | (mC)#(mA)#(mG)(fA)(mG)(fC) |
| | (fC)(mU)(fC)#(mU)#(fG)#(mC)#(mC)#(mU)#(fC)# | (mC)(fU)(mU)(fG)(mU)(mU)(mG) |
| | (mU) (SEQ ID NO: 870) | (fG)#(mG)#(mA)-TegChol (SEQ |
| | | ID NO: 966) |
| HTT1a_644 | P(mU)#(fC)#(mC)(fC)(fC)(fA)(mA)(fC)(mA)(fA)(mG) | (mA)#(mG)#(mA)(fG)(mC)(fC) |
| | (fG)(mC)(fU)#(mC)#(fU)#(mG)#(mC)#(mC)#(fU)# | (mU)(fU)(mG)(fU)(mU)(mG)(mG) |
| | (mU) (SEQ ID NO: 871) | (fG)#(mG)#(mA)-TegChol (SEQ |
| | | ID NO: 967) |
| HTT1a_648 | P(mU)#(fC)#(mA)(fG)(fG)(fC)(mC)(fC)(mC)(fA)(mA) | (mC)#(mC)#(mU)(fU)(mG)(fU) |
| | (fC)(mA)(fA)#(mG)#(fG)#(mC)#(mU)#(mC)#(fU)# | (mU)(fG)(mG)(fG)(mG)(mC)(mC) |
| | (mU) (SEQ ID NO: 872) | (fU)#(mG)#(mA)-TegChol (SEQ |
| | | ID NO: 968) |
| HTT1a_649 | P(mU)#(fA)#(mC)(fA)(fG)(fG)(mC)(fC)(mC)(fC)(mA) | (mC)#(mU)#(mU)(fG)(mU)(fU) |
| | (fA)(mC)(fA)#(mA)#(fG)#(mG)#(mC)#(mU)#(fC)# | (mG)(fG)(mG)(fG)(mC)(mC)(mU) |
| | (mU) (SEQ ID NO: 873) | (fG)#(mU)#(mA)-TegChol (SEQ |
| | | ID NO: 969) |
| HTT1a_650 | P(mU)#(fG)#(mA)(fC)(fA)(fG)(mG)(fC)(mC)(fC)(mC) | (mU)#(mU)#(mG)(fU)(mU)(fG) |
| | (fA)(mA)(fC)#(mA)#(fA)#(mG)#(mG)#(mC)#(fU)# | (mG)(fG)(mG)(fC)(mC)(mU)(mG) |
| | (mU) (SEQ ID NO: 874) | (fU)#(mC)#(mA)-TegChol (SEQ |
| | | ID NO: 970) |
| HTT1a_652 | P(mU)#(fA)#(mG)(fG)(fA)(fC)(mA)(fG)(mG)(fC)(mC) | (mG)#(mU)#(mU)(fG)(mG)(fG) |
| | (fC)(mC)(fA)#(mA)#(fC)#(mA)#(mA)#(mG)#(fG)# | (mG)(fC)(mC)(fU)(mG)(mU)(mC) |
| | (mU) (SEQ ID NO: 875) | (fC)#(mU)#(mA)-TegChol (SEQ |
| | | ID NO: 971) |
| HTT1a_658 | P(mU)#(fG)#(mA)(fA)(fU)(fU)(mC)(fA)(mG)(fG)(mA) | (mG)#(mC)#(mC)(fU)(mG)(fU) |
| | (fC)(mA)(fG)#(mG)#(fC)#(mC)#(mC)#(mC)#(fA)# | (mC)(fC)(mU)(fG)(mA)(mA)(mU) |
| | (mU) (SEQ ID NO: 876) | (fU)#(mC)#(mA)-TegChol (SEQ |
| | | ID NO: 972) |
| HTT1a_659 | P(mU)#(fU)#(mG)(fA)(fA)(fU)(mU)(fC)(mA)(fG)(mG) | (mC)#(mC)#(mU)(fG)(mU)(fC) |
| | (fA)(mC)(fA)#(mG)#(fG)#(mC)#(mC)#(mC)#(fC)# | (mC)(fU)(mG)(fA)(mA)(mU)(mU) |
| | (mU) (SEQ ID NO: 877) | (fC)#(mA)#(mA)-TegChol (SEQ |
| | | ID NO: 973) |
| HTT1a__486 | P(mU)#(fG)#(mU)(fG)(fU)(fC)(mG)(fC)(mC)(fG)(mG) | (mG)#(mC)#(mG)(fG)(mG)(fC) |
| | (fC)(mC)(fC)#(mG)#(fC)#(mA)#(mG)#(mG)#(fC)# | (mC)(fG)(mG)(fC)(mG)(mA)(mC) |
| | (mU) (SEQ ID NO: 878) | (fA)#(mC)#(mA)-TegChol (SEQ |
| | | ID NO: 974) |
| HTT1a__487 | P(mU)#(fC)#(mG)(fU)(fG)(fU)(mC)(fG)(mC)(fC)(mG) | (mC)#(mG)#(mG)(fG)(mC)(fC) |
| | (fG)(mC)(fC)#(mC)#(fG)#(mC)#(mA)#(mG)#(fG)# | (mG)(fG)(mC)(fG)(mA)(mC)(mA) |
| | (mU) (SEQ ID NO: 879) | (fC)#(mG)#(mA)-TegChol (SEQ |
| | | ID NO: 975) |
| HTT1a__488 | P(mU)#(fU)#(mC)(fG)(fU)(fG)(mU)(fC)(mG)(fC)(mC) | (mG)#(mG)#(mG)(fC)(mC)(fG) |
| | (fG)(mG)(fC)#(mC)#(fC)#(mG)#(mC)#(mA)#(fG)# | (mG)(fC)(mG)(fA)(mC)(mA)(mC) |
| | (mU) (SEQ ID NO: 880) | (fG)#(mA)#(mA)-TegChol (SEQ |
| | | ID NO: 976) |
| HTT1a__489 | P(mU)#(fU)#(mU)(fC)(fG)(fU)(mG)(fU)(mC)(fG)(mC) | (mG)#(mG)#(mC)(fC)(mG)(fG) |
| | (fC)(mG)(fG)#(mC)#(fC)#(mC)#(mG)#(mC)#(fA)# | (mC)(fG)(mA)(fC)(mA)(mC)(mG) |
| | (mU) (SEQ ID NO: 881) | (fA)#(mA)#(mA)-TegChol (SEQ |
| | | ID NO: 977) |
| HTT1a__490 | P(mU)#(fG)#(mU)(fU)(fC)(fG)(mU)(fG)(mU)(fC)(mG) | (mG)#(mC)#(mC)(fG)(mG)(fC) |
| | (fC)(mC)(fG)#(mG)#(fC)#(mC)#(mC)#(mG)#(fC)# | (mG)(fA)(mC)(fA)(mC)(mG)(mA) |
| | (mU) (SEQ ID NO: 882) | (fA)#(mC)#(mA)-TegChol (SEQ |
| | | ID NO: 978) |
| HTT1a__492 | P(mU)#(fG)#(mG)(fG)(fU)(fU)(mC)(fG)(mU)(fG)(mU) | (mC)#(mG)#(mG)(fC)(mG)(fA) |
| | (fC)(mG)(fC)#(mC)#(fG)#(mG)#(mC)#(mC)#(fC)# | (mC)(fA)(mC)(fG)(mA)(mA)(mC) |
| | (mU) (SEQ ID NO: 883) | (fC)#(mC)#(mA)-TegChol (SEQ |
| | | ID NO: 979) |
| HTT1a__493 | P(mU)#(fG)#(mG)(fG)(fG)(fU)(mU)(fC)(mG)(fU)(mG) | (mG)#(mG)#(mC)(fG)(mA)(fC) |
| | (fU)(mC)(fG)#(mC)#(fC)#(mG)#(mG)#(mC)#(fC)# | (mA)(fC)(mG)(fA)(mA)(mC)(mC) |
| | (mU) (SEQ ID NO: 884) | (fC)#(mC)#(mA)-TegChol (SEQ |
| | | ID NO: 980) |
| HTT1a__506 | P(mU)#(fC)#(mU)(fC)(fU)(fG)(mC)(fG)(mG)(fG)(mG) | (mC)#(mC)#(mC)(fG)(mG)(fC) |
| | (fC)(mC)(fG)#(mG)#(fG)#(mG)#(mG)#(mU)#(fU)# | (mC)(fC)(mC)(fG)(mC)(mA)(mG) |
| | (mU) (SEQ ID NO: 885) | (fA)#(mG)#(mA)-TegChol (SEQ |
| | | ID NO: 981) |
| HTT1a__507 | P(mU)#(fU)#(mC)(fU)(fC)(fU)(mG)(fC)(mG)(fG)(mG) | (mC)#(mC)#(mG)(fG)(mC)(fC) |
| | (fG)(mC)(fC)#(mG)#(fG)#(mG)#(mG)#(mG)#(fU)# | (mC)(fC)(mG)(fC)(mA)(mG)(mA) |
| | (mU) (SEQ ID NO: 886) | (fG)#(mA)#(mA)-TegChol (SEQ |
| | | ID NO: 982) |
| HTT1a__508 | P(mU)#(fG)#(mU)(fC)(fU)(fC)(mU)(fG)(mC)(fG)(mG) | (mC)#(mG)#(mG)(fC)(mC)(fC) |
| | (fG)(mG)(fC)#(mC)#(fG)#(mG)#(mG)#(mG)#(fG)# | (mC)(fG)(mC)(fA)(mG)(mA)(mG) |
| | (mU) (SEQ ID NO: 887) | (fA)#(mC)#(mA)-TegChol (SEQ |
| | | ID NO: 983) |
| HTT1a__511 | P(mU)#(fU)#(mC)(fU)(fG)(fU)(mC)(fU)(mC)(fU)(mG) | (mC)#(mC)#(mC)(fC)(mG)(fC) |
| | (fC)(mG)(fG)#(mG)#(fG)#(mC)#(mC)#(mG)#(fG)# | (mA)(fG)(mA)(fG)(mA)(mC)(mA) |
| | mU) (SEQ ID NO: 888) | (fG)#(mA)#(mA)-TegChol (SEQ |
| | | ID NO: 984) |
| HTT1a__513 | P(mU)#(fA)#(mC)(fU)(fC)(fU)(mG)(fU)(mC)(fU)(mC) | (mC)#(mC)#(mG)(fC)(mA)(fG) |
| | (fU)(mG)(fC)#(mG)#(fG)#(mG)#(mG)#(mC)#(fC)# | (mA)(fG)(mA)(fC)(mA)(mG)(mA) |
| | (mU) (SEQ ID NO: 889) | (fG)#(mU)#(mA)-TegChol (SEQ |
| | | ID NO: 985) |
| HTT1a__519 | P(mU)#(fU)#(mG)(fG)(fG)(fU)(mC)(fA)(mC)(fU)(mC) | (mA)#(mG)#(mA)(fC)(mA)(fG) |
| | (fU)(mG)(fU)#(mC)#(fU)#(mC)#(mU)#(mG)#(fC)# | (mA)(fG)(mU)(fG)(mA)(mC)(mC) |
| | (mU) (SEQ ID NO: 890) | (fC)#(mA)#(mA)-TegChol (SEQ |
| | | ID NO: 986) |
| HTT1a__520 | P(mU)#(fC)#(mU)(fG)(fG)(fG)(mU)(fC)(mA)(fC)(mU) | (mG)#(mA)#(mC)(fA)(mG)(fA) |
| | (fC)(mU)(fG)#(mU)#(fC)#(mU)#(mC)#(mU)#(fG)# | (mG)(fU)(mG)(fA)(mC)(mC)(mC) |
| | (mU) (SEQ ID NO: 891) | (fA)#(mG)#(mA)-TegChol (SEQ |
| | | ID NO: 987) |
| HTT1a__521 | P(mU)#(fG)#(mC)(fU)(fG)(fG)(mG)(fU)(mC)(fA)(mC) | (mA)#(mC)#(mA)(fG)(mA)(fG) |
| | (fU)(mC)(fU)#(mG)#(fU)#(mC)#(mU)#(mC)#(fU)# | (mU)(fG)(mA)(fC)(mC)(mC)(mA) |
| | (mU) (SEQ ID NO: 892) | (fG)#(mC)#(mA)-TegChol (SEQ |
| | | ID NO: 988) |
| HTT1a__524 | P(mU)#(fG)#(mU)(fU)(fG)(fC)(mU)(fG)(mG)(fG)(mU) | (mG)#(mA)#(mG)(fU)(mG)(fA) |
| | (fC)(mA)(fC)#(mU)#(fC)#(mU)#(mG)#(mU)#(fC)# | (mC)(fC)(mC)(fA)(mG)(mC)(mA) |
| | (mU) (SEQ ID NO: 893) | (fA)#(mC)#(mA)-TegChol (SEQ |
| | | ID NO: 989) |
| HTT1a__525 | P(mU)#(fG)#(mG)(fU)(fU)(fG)(mC)(fU)(mG)(fG)(mG) | (mA)#(mG)#(mU)(fG)(mA)(fC) |
| | (fU)(mC)(fA)#(mC)#(fU)#(mC)#(mU)#(mG)#(fU)# | (mC)(fC)(mA)(fG)(mC)(mA)(mA) |
| | (mU) (SEQ ID NO: 894) | (fC)#(mC)#(mA)-TegChol (SEQ |
| | | ID NO: 990) |
| HTT1a__526 | P(mU)#(fG)#(mG)(fG)(fU)(fU)(mG)(fC)(mU)(fG)(mG) | (mG)#(mU)#(mG)(fA)(mC)(fC) |
| | (fG)(mU)(fC)#(mA)#(fC)#(mU)#(mC)#(mU)#(fG)# | (mC)(fA)(mG)(fC)(mA)(mA)(mC) |
| | (mU) (SEQ ID NO: 895) | (fC)#(mC)#(mA)-TegChol (SEQ |
| | | ID NO: 991) |
| HTT1a__529 | P(mU)#(fU)#(mC)(fU)(fG)(fG)(mG)(fU)(mU)(fG)(mC) | (mA)#(mC)#(mC)(fC)(mA)(fG) |
| | (fU)(mG)(fG)#(mG)#(fU)#(mC)#(mA)#(mC)#(fU)# | (mC)(fA)(mA)(fC)(mC)(mC)(mA) |
| | (mU) (SEQ ID NO: 896) | (fG)#(mA)#(mA)-TegChol (SEQ |
| | | ID NO: 992) |
| HTT1a__537 | P(mU)#(fU)#(mC)(fA)(fU)(fG)(mG)(fG)(mC)(fU)(mC) | (mA)#(mC)#(mC)(fC)(mA)(fG) |
| | (fU)(mG)(fG)#(mG)#(fU)#(mU)#(mG)#(mC)#(fU)# | (mA)(fG)(mC)(fC)(mC)(mA)(mU) |
| | (mU) (SEQ ID NO: 897) | (fG)#(mA)#(mA)-TegChol (SEQ |
| | | ID NO: 993) |
| HTT1a__538 | P(mU)#(fC)#(mU)(fC)(fA)(fU)(mG)(fG)(mG)(fC)(mU) | (mC)#(mC)#(mC)(fA)(mG)(fA) |
| | (fC)(mU)(fG)#(mG)#(fG)#(mU)#(mU)#(mG)#(fC)# | (mG)(fC)(mC)(fC)(mA)(mU)(mG) |
| | (mU) (SEQ ID NO: 898) | (fA)#(mG)#(mA)-TegChol (SEQ |
| | | ID NO: 994) |
| HTT1a__540 | P(mU)#(fC)#(mC)(fC)(fU)(fC)(mA)(fU)(mG)(fG)(mG) | (mC)#(mA)#(mG)(fA)(mG)(fC) |
| | (fC)(mU)(fC)#(mU)#(fG)#(mG)#(mG)#(mU)#(fU)# | (mC)(fC)(mA)(fU)(mG)(mA)(mG) |
| | (mU) (SEQ ID NO: 899) | (fG)#(mG)#(mA)-TegChol (SEQ |
| | | ID NO: 995) |
| HTT1a__541 | P(mU)#(fU)#(mC)(fC)(fC)(fU)(mC)(fA)(mU)(fG)(mG) | (mA)#(mG)#(mA)(fG)(mC)(fC) |
| | (fG)(mC)(fU)#(mC)#(fU)#(mG)#(mG)#(mG)#(fU)# | (mC)(fA)(mU)(fG)(mA)(mG)(mG) |
| | (mU) (SEQ ID NO: 900) | (fG)#(mA)#(mA)-TegChol (SEQ |
| | | ID NO: 996) |
| HTT1a__542 | P(mU)#(fG)#(mU)(fC)(fC)(fC)(mU)(fC)(mA)(fU)(mG) | (mG)#(mA)#(mG)(fC)(mC)(fC) |
| | (fG)(mG)(fC)#(mU)#(fC)#(mU)#(mG)#(mG)#(fG)# | (mA)(fU)(mG)(fA)(mG)(mG)(mG) |
| | (mU) (SEQ ID NO: 901) | (fA)#(mC)#(mA)-TegChol (SEQ |
| | | ID NO: 997) |
| HTT1a_1638 | P(mU)#(fA)#(mC)(fA)(fU)(fC)(mC)(fA)(mG)(fA)(mU) | (mU)#(mU)#(mC)(fC)(mG)(fA) |
| | (fC)(mG)(fG)#(mA)#(fA)#(mA)#(mU)#(mA)#(fG)# | (mU)(fC)(mU)(fG)(mG)(mA)(mU) |
| | (mU) (SEQ ID NO: 902) | (fG)#(mU)#(mA)-TegChol (SEQ |
| | | ID NO: 998) |
| HTT1a_1639 | P(mU)#(fC)#(mA)(fC)(fA)(fU)(mC)(fC)(mA)(fG)(mA) | (mU)#(mC)#(mC)(fG)(mA)(fU) |
| | (fU)(mC)(fG)#(mG)#(fA)#(mA)#(mA)#(mU)#(fA)# | (mC)(fU)(mG)(fG)(mA)(mU)(mG) |
| | (mU) (SEQ ID NO: 903) | (fU)#(mG)#(mA)-TegChol (SEQ |
| | | ID NO: 999) |
| HTT1a_1640 | P(mU)#(fA)#(mC)(fA)(fC)(fA)(mU)(fC)(mC)(fA)(mG) | (mC)#(mC)#(mG)(fA)(mU)(fC) |
| | (fA)(mU)(fC)#(mG)#(fG)#(mA)#(mA)#(mA)#(fU)# | (mU)(fG)(mG)(fA)(mU)(mG)(mU) |
| | (mU) (SEQ ID NO: 904) | (fG)#(mU)#(mA)-TegChol (SEQ |
| | | ID NO: 1000) |
| HTT1a_1641 | P(mU)#(fG)#(mA)(fC)(fA)(fC)(mA)(fU)(mC)(fC)(mA) | (mC)#(mG)#(mA)(fU)(mC)(fU) |
| | (fG)(mA)(fU)#(mC)#(fG)#(mG)#(mA)#(mA)#(fA)# | (mG)(fG)(mA)(fU)(mG)(mU)(mG) |
| | (mU) (SEQ ID NO: 905) | (fU)#(mC)#(mA)-TegChol (SEQ |
| | | ID NO: 1001) |
| HTT1a_1643 | P(mU)#(fG)#(mG)(fG)(fA)(fC)(mA)(fC)(mA)(fU)(mC) | (mA)#(mU)#(mC)(fU)(mG)(fG) |
| | (fC)(mA)(fG)#(mA)#(fU)#(mC)#(mG)#(mG)#(fA)# | (mA)(fU)(mG)(fU)(mG)(mU)(mC) |
| | (mU) (SEQ ID NO: 906) | (fC)#(mC)#(mA)-TegChol (SEQ |
| | | ID NO: 1002) |
| HTT1a_1644 | P(mU)#(fU)#(mG)(fG)(fG)(fA)(mC)(fA)(mC)(fA)(mU) | (mU)#(mC)#(mU)(fG)(mG)(fA) |
| | (fC)(mC)(fA)#(mG)#(fA)#(mU)#(mC)#(mG)#(fG)# | (mU)(fG)(mU)(fG)(mU)(mC)(mC) |
| | (mU) (SEQ ID NO: 907) | (fC)#(mA)#(mA)-TegChol (SEQ |
| | | ID NO: 1003) |
| HTT1a_1646 | P(mU)#(fU)#(mC)(fU)(fG)(fG)(mG)(fA)(mC)(fA)(mC) | (mU)#(mG)#(mG)(fA)(mU)(fG) |
| | (fA)(mU)(fC)#(mC)#(fA)#(mG)#(mA)#(mU)#(fC)# | (mU)(fG)(mU)(fC)(mC)(mC)(mA) |
| | (mU) (SEQ ID NO: 908) | (fG)#(mA)#(mA)-TegChol (SEQ |
| | | ID NO: 1004) |
| HTT1a_1649 | P(mU)#(fC)#(mC)(fA)(fU)(fC)(mU)(fG)(mG)(fG)(mA) | (mA)#(mU)#(mG)(fU)(mG)(fU) |
| | (fC)(mA)(fC)#(mA)#(fU)#(mC)#(mC)#(mA)#(fG)# | (mC)(fC)(mC)(fA)(mG)(mA)(mU) |
| | (mU) (SEQ ID NO: 909) | (fG)#(mG)#(mA)-TegChol (SEQ |
| | | ID NO: 1005) |
| HTT1a_1650 | P(mU)#(fG)#(mC)(fC)(fA)(fU)(mC)(fU)(mG)(fG)(mG) | (mU)#(mG)#(mU)(fG)(mU)(fC) |
| | (fA)(mC)(fA)#(mC)#(fA)#(m)#(mC)#(mC)#(fA)# | (mC)(fC)(mA)(fG)(mA)(mU)(mG) |
| | (mU) (SEQ ID NO: 910) | (fG)#(mC)#(mA)-TegChol (SEQ |
| | | ID NO: 1006) |
| HTT1a_1651 | P(mU)#(fU)#(mG)(fC)(fC)(fA)(mU)(fC)(mU)(fG)(mG) | (mG)#(mU)#(mG)(fU)(mC)(fC) |
| | (fG)(mA)(fC)#(mA)#(fC)#(mA)#(mU)#(mC)#(fC)# | (mC)(fA)(mG)(fA)(mU)(mG)(mG) |
| | (mU) (SEQ ID NO: 911) | (fC)#(mA)#(mA)-TegChol (SEQ |
| | | ID NO: 1007) |
| HTT1a_1652 | P(mU)#(fA)#(mU)(fG)(fC)(fC)(mA)(fU)(mC)(fU)(mG) | (mU)#(mG)#(mU)(fC)(mC)(fC) |
| | (fG)(mG)(fA)#(mC)#(fA)#(mC)#(mA)#(mU)#(fC)# | (mA)(fG)(mA)(fU)(mG)(mG)(mC) |
| | (mU) (SEQ ID NO: 912) | (fA)#(mU)#(mA)-TegChol (SEQ |
| | | ID NO: 1008) |
| HTT1a_1653 | P(mU)#(fA)#(mA)(fU)(fG)(fC)(mC)(fA)(mU)(fC)(mU) | (mG)#(mU)#(mC)(fC)(mC)(fA) |
| | (fG)(mG)(fG)#(mA)#(fC)#(mA)#(mC)#(mA)#(fU)# | (mG)(fA)(mU)(fG)(mG)(mC)(mA) |
| | (mU) (SEQ ID NO: 913) | (fU)#(mU)#(mA)-TegChol (SEQ |
| | | ID NO: 1009) |
| HTT1a_1655 | P(mU)#(fC)#(mA)(fA)(fA)(fU)(mG)(fC)(mC)(fA)(mU) | (mC)#(mC)#(mC)(fA)(mG)(fA) |
| | (fC)(mU)(fG)#(mG)#(fG)#(mA)#(mC)#(mA)#(fC)# | (mU)(fG)(mG)(fC)(mA)(mU)(mU) |
| | (mU) (SEQ ID NO: 914) | (fU)#(mG)#(mA)-TegChol (SEQ |
| | | ID NO: 1010) |
| HTT1a_1657 | P(mU)#(fA)#(mC)(fC)(fA)(fA)(mA)(fU)(mG)(fC)(mC) | (mC)#(mA)#(mG)(fA)(mU)(fG) |
| | (fA)(mU)(fC)#(mU)#(fG)#(mG)#(mG)#(mA)#(fC)# | (mG)(fC)(mA)(fU)(mU)(mU)(mG) |
| | (mU) (SEQ ID NO: 915) | (fG)#(mU)#(mA)-TegChol (SEQ |
| | | ID NO: 1011) |
| HTT1a_1658 | P(mU)#(fU)#(mA)(fC)(fC)(fA)(mA)(fA)(mU)(fG)(mC) | (mA)#(mG)#(mA)(fU)(mG)(fG) |
| | (fC)(mA)(fU)#(mC)#(fU)#(mG)#(mG)#(mG)#(fA)# | (mC)(fA)(mU)(fU)(mU)(mG)(mG) |
| | (mU) (SEQ ID NO: 916) | (fU)#(mA)#(mA)-TegChol (SEQ |
| | | ID NO: 1012) |
| HTT1a_1659 | P(mU)#(fU)#(mU)(fA)(fC)(fC)(mA)(fA)(mA)(fU)(mG) | (mG)#(mA)#(mU)(fG)(mG)(fC) |
| | (fC)(mC)(fA)#(mU)#(fC)#(mU)#(mG)#(mG)#(fG)# | (mA)(fU)(mU)(fU)(mG)(mG)(mU) |
| | (mU) (SEQ ID NO: 917) | (fA)#(mA)#(mA)-TegChol (SEQ |
| | | ID NO: 1013) |
| HTT1a_1660 | P(mU)#(fC)#(mU)(fU)(fA)(fC)(mC)(fA)(mA)(fA)(mU) | (mA)#(mU)#(mG)(fG)(mC)(fA) |
| | (fG)(mC)(fC)#(mA)#(fU)#(mC)#(mU)#(mG)#(fG)# | (mU)(fU)(mU)(fG)(mG)(mU)(mA) |
| | (mU) (SEQ ID NO: 918) | (fA)#(mG)#(mA)-TegChol (SEQ |
| | | ID NO: 1014) |
| HTT1a_1661 | P(mU)#(fU)#(mC)(fU)(fU)(fA)(mC)(fC)(mA)(fA)(mA) | (mU)#(mG)#(mG)(fC)(mA)(fU) |
| | (fU)(mG)(fC)#(mC)#(fA)#(mU)#(mC)#(mU)#(fG)# | (mU)(fU)(mG)(fG)(mU)(mA)(mA) |
| | (mU) (SEQ ID NO: 919) | (fG)#(mA)#(mA)-TegChol (SEQ |
| | | ID NO: 1015) |
| HTT1a_1662 | P(mU)#(fU)#(mU)(fC)(fU)(fU)(mA)(fC)(mC)(fA)(mA) | (mG)#(mG)#(mC)(fA)(mU)(fU) |
| | (fA)(mU)(fG)#(mC)#(fC)#(mA)#(mU)#(mC)#(fU)# | (mU)(fG)(mG)(fU)(mA)(mA)(mG) |
| | (mU) (SEQ ID NO: 920) | (fA)#(mA)#(mA)-TegChol (SEQ |
| | | ID NO: 1016) |
| HTT1a_1663 | P(mU)#(fA)#(mU)(fU)(fC)(fU)(mU)(fA)(mC)(fC)(mA) | (mG)#(mC)#(mA)(fU)(mU)(fU) |
| | (fA)(mA)(fU)#(mG)#(fC)#(mC)#(mA)#(mU)#(fC)# | (mG)(fG)(mU)(fA)(mA)(mG)(mA) |
| | (mU) (SEQ ID NO: 921) | (fA)#(mU)#(mA)-TegChol (SEQ |
| | | ID NO: 1017) |
| HTT1a_1664 | P(mU)#(fU)#(mA)(fU)(fU)(fC)(mU)(fU)(mA)(fC)(mC) | (mC)#(mA)#(mU)(fU)(mU)(fG) |
| | (fA)(mA)(fA)#(mU)#(fG)#(mC)#(mC)#(mA)#(fU)# | (mG)(fU)(mA)(fA)(mG)(mA)(mA) |
| | (mU) (SEQ ID NO: 922) | (fU)#(mA)#(mA)-TegChol (SEQ |
| | | ID NO: 1018) |
| HTT1a_1665 | P(mU)#(fA)#(mU)(fA)(fU)(fU)(mC)(fU)(mU)(fA)(mC) | (mA)#(mU)#(mU)(fU)(mG)(fG) |
| | (fC)(mA)(fA)#(mA)#(fU)#(mG)#(mC)#(mC)#(fA)# | (mU)(fA)(mA)(fG)(mA)(mA)(mU) |
| | (mU) (SEQ ID NO: 923) | (fA)#(mU)#(mA)-TegChol (SEQ |
| | | ID NO: 1019) |
| HTT1a_1666 | P(mU)#(fG)#(mA)(fU)(fA)(fU)(mU)(fC)(mU)(fU)(mA) | (mU)#(mU)#(mU)(fG)(mG)(fU) |
| | (fC)(mC)(fA)#(mA)#(fA)#(mU)#(mG)#(mC)#(fC)# | (mA)(fA)(mG)(fA)(mA)(mU)(mA) |
| | (mU) (SEQ ID NO: 924) | (fU)#(mC)#(mA)-TegChol (SEQ |
| | | ID NO: 1020) |
| HTT1a_1667 | P(m)#(fA)#(mG)(fA)(fU)(fA)(mU)(fU)(mC)(fU)(mU) | (mU)#(mU)#(mG)(fG)(mU)(fA) |
| | (fA)(mC)(fC)#(mA)#(fA)#(mA)#(mU)#(mG)#(fC)# | (mA)(fG)(mA)(fA)(mU)(mA)(mU) |
| | (mU) (SEQ ID NO: 925) | (fC)#(mU)#(mA)-TegChol (SEQ |
| | | ID NO: 1021) |

“f” corresponds to a nucleotide with a 2′-fluoro modification; “m” corresponds to a nucleotide with a 2′-O-methyl modification; “#” corresponds to a phosphorothioate internucleotide linkage; “P” corresponds to a 5′ phosphate; “TegChol” corresponds to a cholesterol moiety conjugated via a triethylene glycol linker

### INCORPORATION BY REFERENCE

[0631] The contents of all cited references (including literature references, patents, patent applications, and websites) that maybe cited throughout this application are hereby expressly incorporated by reference in their entirety for any purpose, as are the references cited therein. The disclosure will employ, unless otherwise indicated, conventional techniques of immunology, molecular biology and cell biology, which are well known in the art.

[0632] The present disclosure also incorporates by reference in their entirety techniques well known in the field of molecular biology and drug delivery. These techniques include, but are not limited to, techniques described in the following publications:
[0633] Atwell et al. J. Mol. Biol. 1997, 270: 26-35;
[0634] Ausubel et al. (eds.), CURRENT PROTOCOLS IN MOLECULAR BIOLOGY, John Wiley &Sons, N Y (1993);
[0635] Ausubel, F. M. et al. eds., SHORT PROTOCOLS IN MOLECULAR BIOLOGY (4th Ed. 1999) John Wiley & Sons, NY. (ISBN 0-471-32938-X);
[0636] CONTROLLED DRUG BIOAVAILABILITY, DRUG PRODUCT DESIGN AND PERFORMANCE, Smolen and Ball (eds.), Wiley, New York (1984);
[0637] Giege, R. and Ducruix, A. Barrett, CRYSTALLIZATION OF NUCLEIC ACIDS AND PROTEINS, a Practical Approach, 2nd ea., pp. 20 1-16, Oxford University Press, New York, New York, (1999);
[0638] Goodson, in MEDICAL APPLICATIONS OF CONTROLLED RELEASE, vol. 2, pp. 115-138 (1984);
[0639] Hammerling, et al., in: MONOCLONAL ANTIBODIES AND T-CELL HYBRIDOMAS 563-681 (Elsevier, N.Y., 1981;
[0640] Harlow et al., ANTIBODIES: A LABORATORY MANUAL, (Cold Spring Harbor Laboratory Press, 2nd ed. 1988);
[0641] Kabat et al., SEQUENCES OF PROTEINS OF IMMUNOLOGICAL INTEREST (National Institutes of Health, Bethesda, Md. (1987) and (1991);
[0642] Kabat, E. A., et al. (1991) SEQUENCES OF PROTEINS OF IMMUNOLOGICAL INTEREST, Fifth Edition, U.S. Department of Health and Human Services, NIH Publication No. 91-3242;
[0643] Kontermann and Dubel eds., ANTIBODY ENGINEERING (2001) Springer-Verlag. New York. 790 pp. (ISBN 3-540-41354-5).
[0644] Kriegler, Gene Transfer and Expression, A Laboratory Manual, Stockton Press, N Y (1990);
[0645] Lu and Weiner eds., CLONING AND EXPRESSION VECTORS FOR GENE FUNCTION ANALYSIS (2001) BioTechniques Press. Westborough, MA. 298 pp. (ISBN 1-881299-21-X).
[0646] MEDICAL APPLICATIONS OF CONTROLLED RELEASE, Langer and Wise (eds.), CRC Pres., Boca Raton, Fla. (1974);
[0647] Old, R. W. & S. B. Primrose, PRINCIPLES OF GENE MANIPULATION: AN INTRODUCTION TO GENETIC ENGINEERING (3d Ed. 1985) Blackwell Scientific Publications, Boston. Studies in Microbiology; V.2:409 pp. (ISBN 0-632-01318-4).
[0648] Sambrook, J. et al. eds., MOLECULAR CLONING: A LABORATORY MANUAL (2d Ed. 1989) Cold Spring Harbor Laboratory Press, NY. Vols. 1-3. (ISBN 0-87969-309-6).
[0649] SUSTAINED AND CONTROLLED RELEASE DRUG DELIVERY SYSTEMS, J. R. Robinson, ed., Marcel Dekker, Inc., New York, 1978
[0650] Winnacker, E. L. FROM GENES TO CLONES: INTRODUCTION TO GENE TECHNOLOGY (1987) VCH Publishers, NY (translated by Horst Ibelgaufts). 634 pp. (ISBN 0-89573-614-4).

### EQUIVALENTS

[0651] The disclosure may be embodied in other specific forms without departing from the spirit or essential characteristics thereof. The foregoing embodiments are therefore to be considered in all respects illustrative rather than limiting of the disclosure. Scope of the disclosure is thus indicated by the appended claims rather than by the foregoing description, and all changes that come within the meaning and range of equivalency of the claims are therefore intended to be embraced herein.

The application's sequence listing, which the Patent Office published only in electronic form, follows.

SEQUENCE LISTING (1025 sequences)

SEQ ID NO: 1 - DNA, 45 bp, Homo sapiens
  source 1..45: mol_type = genomic DNA
gatgtgtcccagatggcatttggtaagaatatctctgttaagact

SEQ ID NO: 2 - DNA, 45 bp, Homo sapiens
  source 1..45: mol_type = genomic DNA
ggatgtgtcccagatggcatttggtaagaatatctctgttaagac

SEQ ID NO: 3 - DNA, 45 bp, Homo sapiens
  source 1..45: mol_type = genomic DNA
tggatgtgtcccagatggcatttggtaagaatatctctgttaaga

SEQ ID NO: 4 - DNA, 45 bp, Homo sapiens
  source 1..45: mol_type = genomic DNA
ctggatgtgtcccagatggcatttggtaagaatatctctgttaag

SEQ ID NO: 5 - DNA, 45 bp, Homo sapiens
  source 1..45: mol_type = genomic DNA
tctggatgtgtcccagatggcatttggtaagaatatctctgttaa

SEQ ID NO: 6 - DNA, 45 bp, Homo sapiens
  source 1..45: mol_type = genomic DNA
atctggatgtgtcccagatggcatttggtaagaatatctctgtta

SEQ ID NO: 7 - DNA, 45 bp, Homo sapiens
  source 1..45: mol_type = genomic DNA
gatctggatgtgtcccagatggcatttggtaagaatatctctgtt

SEQ ID NO: 8 - DNA, 45 bp, Homo sapiens
  source 1..45: mol_type = genomic DNA
cgatctggatgtgtcccagatggcatttggtaagaatatctctgt

SEQ ID NO: 9 - DNA, 45 bp, Homo sapiens
  source 1..45: mol_type = genomic DNA
ccgatctggatgtgtcccagatggcatttggtaagaatatctctg

SEQ ID NO: 10 - DNA, 45 bp, Homo sapiens
  source 1..45: mol_type = genomic DNA
tccgatctggatgtgtcccagatggcatttggtaagaatatctct

SEQ ID NO: 11 - DNA, 45 bp, Homo sapiens
  source 1..45: mol_type = genomic DNA
ttccgatctggatgtgtcccagatggcatttggtaagaatatctc

SEQ ID NO: 12 - DNA, 45 bp, Homo sapiens
  source 1..45: mol_type = genomic DNA
atttccgatctggatgtgtcccagatggcatttggtaagaatatc

SEQ ID NO: 13 - DNA, 45 bp, Homo sapiens
  source 1..45: mol_type = genomic DNA
tatttccgatctggatgtgtcccagatggcatttggtaagaatat

SEQ ID NO: 14 - RNA, 20 nt, Homo sapiens
  source 1..20: mol_type = genomic RNA
gcatttggtaagaatatctc

SEQ ID NO: 15 - RNA, 20 nt, Homo sapiens
  source 1..20: mol_type = genomic RNA
ggcatttggtaagaatatct

SEQ ID NO: 16 - RNA, 20 nt, Homo sapiens
  source 1..20: mol_type = genomic RNA
tggcatttggtaagaatatc

SEQ ID NO: 17 - RNA, 20 nt, Homo sapiens
  source 1..20: mol_type = genomic RNA
atggcatttggtaagaatat

SEQ ID NO: 18 - RNA, 20 nt, Homo sapiens
  source 1..20: mol_type = genomic RNA
gatggcatttggtaagaata

SEQ ID NO: 19 - RNA, 20 nt, Homo sapiens
  source 1..20: mol_type = genomic RNA
agatggcatttggtaagaat

SEQ ID NO: 20 - RNA, 20 nt, Homo sapiens
  source 1..20: mol_type = genomic RNA
cagatggcatttggtaagaa

SEQ ID NO: 21 - RNA, 20 nt, Homo sapiens
  source 1..20: mol_type = genomic RNA
ccagatggcatttggtaaga

SEQ ID NO: 22 - RNA, 20 nt, Homo sapiens
  source 1..20: mol_type = genomic RNA
cccagatggcatttggtaag

SEQ ID NO: 23 - RNA, 20 nt, Homo sapiens
  source 1..20: mol_type = genomic RNA
tcccagatggcatttggtaa

SEQ ID NO: 24 - RNA, 20 nt, Homo sapiens
  source 1..20: mol_type = genomic RNA
gtcccagatggcatttggta

SEQ ID NO: 25 - RNA, 20 nt, Homo sapiens
  source 1..20: mol_type = genomic RNA
gtgtcccagatggcatttgg

SEQ ID NO: 26 - RNA, 20 nt, Homo sapiens
  source 1..20: mol_type = genomic RNA
tgtgtcccagatggcatttg

SEQ ID NO: 27 - DNA, 45 bp, Homo sapiens
  source 1..45: mol_type = genomic DNA
ccgactgagtttgggcccgctgcagctccctgtcccggcgggtcc

SEQ ID NO: 28 - DNA, 45 bp, Homo sapiens
  source 1..45: mol_type = genomic DNA
ttgggcccgctgcagctccctgtcccggcgggtcccaggctacgg

SEQ ID NO: 29 - DNA, 45 bp, Homo sapiens
  source 1..45: mol_type = genomic DNA
cctgtcccggcgggtcccaggctacggcggggatggcggtaaccc

SEQ ID NO: 30 - DNA, 45 bp, Homo sapiens
  source 1..45: mol_type = genomic DNA
gacacgaacccccggccccgcagagacagagtgacccagcaaccc

SEQ ID NO: 31 - DNA, 45 bp, Homo sapiens
  source 1..45: mol_type = genomic DNA
aggccttcccccacttcagccccgctccctcacttgggtcttccc

SEQ ID NO: 32 - DNA, 45 bp, Homo sapiens
  source 1..45: mol_type = genomic DNA
ttcccccacttcagccccgctccctcacttgggtcttcccttgtc

SEQ ID NO: 33 - DNA, 45 bp, Homo sapiens
  source 1..45: mol_type = genomic DNA
ctccctcacttgggtcttcccttgtcctctcgcgaggggaggcag

SEQ ID NO: 34 - DNA, 45 bp, Homo sapiens
  source 1..45: mol_type = genomic DNA
aggcagagccttgttggggcctgtcctgaattcaccgaggggagt

SEQ ID NO: 35 - DNA, 7332 bp, Homo sapiens
  source 1..7332: mol_type = genomic DNA
gtgagtttgggcccgctgcagctccctgtcccggcgggtcccaggctacggcggggatggcggtaaccctgcagcctgcgggccggcgacacgaacccccggccccgcagagacagagtgacccagcaacccagagcccatgagggacacccgccccctcctggggcgaggccttcccccacttcagccccgctccctcacttgggtcttcccttgtcctctcgcgaggggaggcagagccttgttggggcctgtcctgaattcaccgaggggagtcacggcctcagccctctcgcccttcgcaggatgcgaagagttggggcgagaacttgtttctttttatttgcgagaaaccagggcgggggttcttttaactgcgttgtgaagagaacttggaggagccgagatttgctcagtgccacttccctcttctagtctgagagggaagagggctgggggcgcgggacacttcgagaggaggcggggtttggagctggagagatgtgggggcagtggatgacataatgcttttaggacgcctcggcgggagtggcggggcagggggggggcggggagtgagggcgcgtccaatgggagatttcttttcctagtggcacttaaaacagcctgagatttgaggctcttcctacattgtcaggacatttcatttagttcatgatcacggtggtagtaacacgattttaagcaccacctaagagatctgctcatctaagcctaagttggtctgcaggcgtttgaatgagttgtggttgccaagtaaagtggtgaacttacgtggtgattaatgaaattatcttaaatattaggaagagttgattgaagttttttgcctatgtgtgttgggaataaaaccaacacgttgctgatggggaggttaattgccgagggatgaatgaggtgtacattttaccagtattccagtcaggcttgccagaatacggggggtccgcagactccgtgggcatctcagatgtgccagtgaaagggtttctgtttgcttcattgctgacagcttgttactttttggaagctaggggtttctgttgcttgttcttggggagaatttttgaaacaggaaaagagagaccattaaaacatctagcggaaccccaggactttccctggaagtctgtgtgtcgagtgtacagtaggagttaggaagtactctggtgcagttcaggcctttctcttacctctcagtattctatttccgatctggatgtgtcccagatggcatttggtaagaatatctctgttaagactgattaatttttagtaatatttcttgttctttgtttctgttatgatccttgtctcgtcttcaaagtttaattagaaaatgattcggagagcagtgttagcttatttgttggaataaaatttaggaataaattattctaaaggatggaaaaactttttggatatttggagaaattttaaaacaatttggcttatctcttcagtaagtaatttctcatccagaaatttactgtagtgcttttctaggaggtaggtgtcataaaagttcacacattgcatgtatcttgtgtaaacactaaacagggctcctgatgggaaggaagacctttctgctgggctgcttcagacacttgatcattctaaaaatatgccttctctttcttatgctgatttgacagaacctgcatttgcttatcttcaaaatatgggtatcaagaaatttcctttgctgccttgacaaaggagatagattttgtttcattactttaaggtaatatatgattaccttatttaaaaaatttaatcaggactggcaaggtggcttacacctttaatccgagcactttgggaggcctaggtggacgaatcacctgaggtcaggagtttgagaccagcctggctaacatggtgaaaccctgtctctactaaaaatacaaaaattagctggtcatggtggcacgtgcctgtaatccaagctacctgggaggctgaggcaggaaaatcgcttgaacccgggaggcagagtctgcagtgagttgagatcacgccactgcactccagcctgggtgacagagcgagactctatctcaaaaaaaattttttttaatgtattatttttgcataagtaatacattgacatgatacaaattctgtaattacaaaagggcaataattaaaatatcttccttccacccctttcctctgagtacctaactttgtccccaagaacaagcactatttcagttcctcatgtatcctgccagatataacctgttcatattgtaagatagatttaaaatgctctaaaaacaaaagtagtttagaataatatatatctatatattttttgagatgtagtctcacattgtcacccaggctggagtgcagtgatacaatctcggctcactgcagtctctgcctcccaggttcaaatgcttctcctgcctcagccttctgagtagctgggattacaggcgcccaccaccatgtccagctaatttttgtatttttagtagagatggggtttcaccatgttggccaggctggtcttgaactcctgaccttgtgatctgtccacctcggcctcccaaagtgctgggattacaggtgtgagccaccatgcctggctagaataataacttttaaaggttcttagcatgctctgaaatcaactgcattaggtttatttatagttttatagttattttaaataaaatgcatatttgtcatatttctctgtattttgctgttgagaaaggaggtattcactaattttgagtaacaaacactgctcacaaagtttggattttggcagttctgttcacgtgcttcagccaaaaaatcctcttctcaaagtaagattgatgaaagcaatttagaaagtatctgttctgtttttatggctcttgctctttggtgtggaactgtggtgtcacgccatgcatgggcctcagtttatgagtgtttgtgctctgctcagcatacaggatgcaggagttccttatggggctggctgcaggctcagcaaatctagcatgcttgggagggtcctcacagtaattaggaggcaattaatacttgcttctggcagtttcttattctccttcagattcctatctggtgtttccctgactttattcattcatcagtaaatatttactaaacatgtactatgtgcctggcactgttataggtgcagggctcagcagtgagcagacaaagctctgccctcgtgaagctttcattctaatgaaggacatagacagtaagcaagatagataagtaaaatatacagtacgttaatacgtggaggaacttcaaagcagggaaggggatagggaaatgtcagggttaatcgagtgttaacttatttttatttttaaaaaaattgttaagggctttccagcaaaacccagaaagcctgctagacaaattccaaaagagctgtagcactaagtgttgacatttttattttattttgttttgttttgttttttttgagacagttcttgctctatcagccaggctggagtgcactagtgtgatcttggctcactgcaacctctgcctcttgggttcaagtgattctcatgcctcagcctcctgtttagctgggattatagacatgcactgccatgcctgggtaattttttttttttcccccgagacggagtcttgctctgtcgcccaggctggagtgcagtggcgcgatctcagctcactgcaagctccgcttcccgagttcacgccattctcctgcctcagtctcccaagtagctgggactacaggcgcctgccaccacgtccagctaatttttttgtatttttaatagagacggggtttcaccgtgttagccaggatgatcttgatctcctgacctcgtcatccgccgaccttgtgatccgcccacctcggcctcccaaagtgctgggattacaggcatgagccactgtgcccggccacgcctgggtaatttttgtatttttagtagagatggggttttgccatgatgagcaggctggtctcgaactcccggcctcatgtgatctgcctgccttggcctcccaaagtgctaggattacaggcatgagccaccatacctggccagtgttgatattttaaatacggtgttcagggaaggtccactgagaagacagctttttttttttttttttttggggttggggggcaaggtcttgctctttaacccaggctggaatgcagtatcactatcgtagctcacttcagccttgaactcctgggctcaagtgatcctcccacctcaacctcacaatgtgttgggactataggtgtgagccatcacacctggccagatgatggcttttgagtaaagacctcaagcgagttaagagtctagtgtaagggtgtatgaagtagtggtattccagatggggggaacaggtccaaaatcttcctgtttcaggaatagcaaggatgtcattttagttgggtgaattgagtgagggggacatttgtagtaagaagtaaggtccaagaggtcaagggagtgccatatcagaccaatactacttgccttgtagatggaataaagatattggcatttatgtgagtgagatgggatgtcactggaggattagagcagaggagtagcatgatctgaatttcaatcttaagtgaactctggctgacaacagagtgaaggggaacaccggcaaaagcagaaaccagttaggaagccactgcagtgctcagataagcatggtgggttctgtcagggtaccggctgtcggctgtgggcagtgtgaggaatgactgactggattttgaatgcggaaccaactgcacttgttgaactctgctaagtataacaatttagcagtagcttgcgttatcaggtttgtattcagctgcaagtaacagaaaatcctgctgcaatagcttaaactggtaacaagcaagagcttatcagaagacaaaaataagtctggggaaattcaacaataagttaaggaacccaggctctttcttttttttttttttgaaacggagtttcgctcttgtcacccgggctggagtgcaatgatgtgatctcagctcactaaaacctctacctcctgggttcaagtgattcttctgcctcagcctcccaagtaactgggattacaggcgtataccaccatgcccagctaatttttgtgtttttagtagagatggggtttcaccatgttggccaggctggtctcgaacttctgacctcaggtgatccactcgcctcagcctgccaaagtgctgggattacaggtttgggccactgcacccggtcagaacccaggctctttcttatacttaccttgcaaacccttgttctcattttttccctttgtatttttattgttgaattgtaatagttctttatatattctggatactggattcttatcagatagatgatttgtaaaaactctcccttcctttggattgtctttttactttcttgatagtgtcttttgaagtgtaaaagtttttaattttgatgaagtcgagtttatctattttgtctttggttgctgtgcttcaagtgtcatatctaagaaatcattgtctaatccaaagtcaaaaaggtttactcctatgttttcttctaagaattttagagttttacatttaagtctgatccattttgagttaatttttatatatggttcaggtagaagtccaactttattcttttccatgtggttattcagttgtcccagcactgtttgttgaagagactattctttccccatggaattatcttagtacccttgttgaaaattaatcgtccttaattgtataaatttatttctagactgtcagttctacctgttggtctttatgtcgatcctgtgccagtaccatacagtcttgattactgaagtttgtgtcacagtttaaattcatgaaatgtgagttctccaactttgttccttttcaagattgatttggccatgctgggtcccttgcatttccgtacgaattgtaggatcagcttgtcagtttcaacaaagaagccaagtaggattctgagagggattgtgttgaatctgtagatcaacttggggagtattcgcatcttaacaatattgtcttccacctatgaacatgggcaaactttgtgtaaatggtcagattgtaagtatttcgggctgtgtgggcacagtgtctctgtcacagctacgcggctctgccattgtagcatgaaagtagccataagcaatatgtatgagtgtctgtgttccaatagaattttattaatgacaaggaagtttgaatttcatataattttcacctgtcatgagatagtatttgattattttggtcaaccatttaaaaatgtaaaaacatttcttagcttgtgaactagccaaaaatatgcaggttatagttttcccactcctaggttaaaatatgataggaccacatttggaaagcatttctttttttttttttttttttttttttgagacggagtttcactcttgttgcccaggctggagtgcagtggcgcgatctcggctcactgcaacctctgcctcccaggttcaagacattctcctgcacggcctccctagtagctgggattacaggcatgcgccaccacacccagctaattttgtatttttagtagagacggggtttctccatgttggtcaggctggtcttgaactcctgacctcaggtgatccacccgcctcagcctcccaaagtgctgggattacagggtgtgagccaccacaccctgctggaaagcatttcttttttggctgtttttgttttttttttaaactagttttgaaaattataaaagttacacatatacattataaaaatatcttcaagcagcacagatgaaaaacaaagcccttcttgcaagtctgtcatctttgtctaacttcctaagaacaaaagtgtttcttgtgtcttcttcccagattttaatatgcatatacaagcatttaaatgtgtcattttttgtttgcttgactgagatcacattacatatgtatttttttacttaacaatgtgtcatagatattgttccatagcagtacctgtaattcttattaattgctatgtaatattttagaatttctttttaaaagaggacttttggagatgtaaaggcaaaggtctcacatttttgtggctgtagaatgtgctggtgacatattctctctaccttgagaagtccccatccccatcacctccatttcctgtaaataagtcaaccacttgataaactacctttgaatggatccacactcaaaacatttagtcttattcagacaacaaggaggaaaaataaa

SEQ ID NO: 36 - RNA, 45 nt, Homo sapiens
  source 1..45: mol_type = genomic RNA
cctacattgtcaggacatttcatttagttcatgatcacggtggta

SEQ ID NO: 37 - RNA, 45 nt, Homo sapiens
  source 1..45: mol_type = genomic RNA
agcctaagttggtctgcaggcgtttgaatgagttgtggttgccaa

SEQ ID NO: 38 - RNA, 45 nt, Homo sapiens
  source 1..45: mol_type = genomic RNA
ggagtgcaatgatgtgatctcagctcactaaaacctctacctcct

SEQ ID NO: 39 - RNA, 45 nt, Homo sapiens
  source 1..45: mol_type = genomic RNA
tggccatgctgggtcccttgcatttccgtacgaattgtaggatca

SEQ ID NO: 40 - RNA, 45 nt, Homo sapiens
  source 1..45: mol_type = genomic RNA
tgtatgagtgtctgtgttccaatagaattttattaatgacaagga

SEQ ID NO: 41 - RNA, 45 nt, Homo sapiens
  source 1..45: mol_type = genomic RNA
tgagaagtccccatccccatcacctccatttcctgtaaataagtc

SEQ ID NO: 42 - RNA, 40 nt, Mus sp.
  source 1..40: mol_type = genomic RNA
cgtttcatttagtttgtggtgtagtgtagttaaaccaggt

SEQ ID NO: 43 - RNA, 40 nt, Mus sp.
  source 1..40: mol_type = genomic RNA
ttcatttagtttgtggtgtagtgtagttaaaccaggtttt

SEQ ID NO: 44 - RNA, 40 nt, Mus sp.
  source 1..40: mol_type = genomic RNA
cagttggatgagttgtatttgtcaagtacatggtgagtta

SEQ ID NO: 45 - RNA, 20 nt, Homo sapiens
  source 1..20: mol_type = genomic RNA
catttcatttagttcatgat

SEQ ID NO: 46 - RNA, 20 nt, Homo sapiens
  source 1..20: mol_type = genomic RNA
gcaggcgtttgaatgagttg

SEQ ID NO: 47 - RNA, 20 nt, Homo sapiens
  source 1..20: mol_type = genomic RNA
gatctcagctcactaaaacc

SEQ ID NO: 48 - RNA, 20 nt, Homo sapiens
  source 1..20: mol_type = genomic RNA
ccttgcatttccgtacgaat

SEQ ID NO: 49 - RNA, 20 nt, Homo sapiens
  source 1..20: mol_type = genomic RNA
gttccaatagaattttatta

SEQ ID NO: 50 - RNA, 20 nt, Homo sapiens
  source 1..20: mol_type = genomic RNA
cccatcacctccatttcctg

SEQ ID NO: 51 - RNA, 20 nt, Mus sp.
  source 1..20: mol_type = genomic RNA
gtggtgtagtgtagttaaac

SEQ ID NO: 52 - RNA, 20 nt, Mus sp.
  source 1..20: mol_type = genomic RNA
gtgtagtgtagttaaaccag

SEQ ID NO: 53 - RNA, 20 nt, Mus sp.
  source 1..20: mol_type = genomic RNA
tatttgtcaagtacatggtg

SEQ ID NO: 54 - RNA, 20 nt, Homo sapiens
  source 1..20: mol_type = genomic RNA
tcggtgaattcaggacaggc

SEQ ID NO: 55 - RNA, 20 nt, Homo sapiens
  source 1..20: mol_type = genomic RNA
tagaagagggaagtggcact

SEQ ID NO: 56 - RNA, 20 nt, Homo sapiens
  source 1..20: mol_type = genomic RNA
ttgacaatgtaggaagagcc

SEQ ID NO: 57 - RNA, 20 nt, Homo sapiens
  source 1..20: mol_type = genomic RNA
ttcctgacaatgtaggaaga

SEQ ID NO: 58 - RNA, 20 nt, Homo sapiens
  source 1..20: mol_type = genomic RNA
taactaaatgaaatgtcctg

SEQ ID NO: 59 - RNA, 20 nt, Homo sapiens
  source 1..20: mol_type = genomic RNA
ttcatgaactaaatgaaatg

SEQ ID NO: 60 - RNA, 20 nt, Homo sapiens
  source 1..20: mol_type = genomic RNA
taactcattcaaacgcctgc

SEQ ID NO: 61 - RNA, 20 nt, Homo sapiens
  source 1..20: mol_type = genomic RNA
tctggcacatctgagatgcc

SEQ ID NO: 62 - RNA, 20 nt, Homo sapiens
  source 1..20: mol_type = genomic RNA
tcactggcacatctgagatg

SEQ ID NO: 63 - RNA, 20 nt, Homo sapiens
  source 1..20: mol_type = genomic RNA
tagaacaagcaacagaaacc

SEQ ID NO: 64 - RNA, 20 nt, Homo sapiens
  source 1..20: mol_type = genomic RNA
taaatgccatctgggacaca

SEQ ID NO: 65 - RNA, 20 nt, Homo sapiens
  source 1..20: mol_type = genomic RNA
tagacgagacaaggatcata

SEQ ID NO: 66 - RNA, 20 nt, Homo sapiens
  source 1..20: mol_type = genomic RNA
tacaagatacatgcaatgtg

SEQ ID NO: 67 - RNA, 20 nt, Homo sapiens
  source 1..20: mol_type = genomic RNA
ttcagcataagaaagagaag

SEQ ID NO: 68 - RNA, 20 nt, Homo sapiens
  source 1..20: mol_type = genomic RNA
tagcaaatgcaggttctgtc

SEQ ID NO: 69 - RNA, 20 nt, Homo sapiens
  source 1..20: mol_type = genomic RNA
taagataagcaaatgcaggt

SEQ ID NO: 70 - RNA, 20 nt, Homo sapiens
  source 1..20: mol_type = genomic RNA
ttaatgaaacaaaatctatc

SEQ ID NO: 71 - RNA, 20 nt, Homo sapiens
  source 1..20: mol_type = genomic RNA
ttcggattaaaggtgtaagc

SEQ ID NO: 72 - RNA, 20 nt, Homo sapiens
  source 1..20: mol_type = genomic RNA
tagtagagacagggtttcac

SEQ ID NO: 73 - RNA, 20 nt, Homo sapiens
  source 1..20: mol_type = genomic RNA
tttagtagagacagggtttc

SEQ ID NO: 74 - RNA, 20 nt, Homo sapiens
  source 1..20: mol_type = genomic RNA
tcccgggttcaagcgatttt

SEQ ID NO: 75 - RNA, 20 nt, Homo sapiens
  source 1..20: mol_type = genomic RNA
tagtggcgtgatctcaactc

SEQ ID NO: 76 - RNA, 20 nt, Homo sapiens
  source 1..20: mol_type = genomic RNA
tgatagagtctcgctctgtc

SEQ ID NO: 77 - RNA, 20 nt, Homo sapiens
  source 1..20: mol_type = genomic RNA
tctggccaacatggtgaaac

SEQ ID NO: 78 - RNA, 20 nt, Homo sapiens
  source 1..20: mol_type = genomic RNA
tagttgatttcagagcatgc

SEQ ID NO: 79 - RNA, 20 nt, Homo sapiens
  source 1..20: mol_type = genomic RNA
tggctgaagcacgtgaacag

SEQ ID NO: 80 - RNA, 20 nt, Homo sapiens
  source 1..20: mol_type = genomic RNA
ttccacaccaaagagcaaga

SEQ ID NO: 81 - RNA, 20 nt, Homo sapiens
  source 1..20: mol_type = genomic RNA
ttcctaattactgtgaggac

SEQ ID NO: 82 - RNA, 20 nt, Homo sapiens
  source 1..20: mol_type = genomic RNA
tcagggaaacaccagatagg

SEQ ID NO: 83 - RNA, 20 nt, Homo sapiens
  source 1..20: mol_type = genomic RNA
tcctgctttgaagttcctcc

SEQ ID NO: 84 - RNA, 20 nt, Homo sapiens
  source 1..20: mol_type = genomic RNA
ttaagttaacacttgattaa

SEQ ID NO: 85 - RNA, 20 nt, Homo sapiens
  source 1..20: mol_type = genomic RNA
tcaagatcacactagtgcac

SEQ ID NO: 86 - RNA, 20 nt, Homo sapiens
  source 1..20: mol_type = genomic RNA
tctggctaacacggtgaaac

SEQ ID NO: 87 - RNA, 20 nt, Homo sapiens
  source 1..20: mol_type = genomic RNA
tcctgggttaaagagcaaga

SEQ ID NO: 88 - RNA, 20 nt, Homo sapiens
  source 1..20: mol_type = genomic RNA
ttcttaactcgcttgaggtc

SEQ ID NO: 89 - RNA, 20 nt, Homo sapiens
  source 1..20: mol_type = genomic RNA
tctaatcctccagtgacatc

SEQ ID NO: 90 - RNA, 20 nt, Homo sapiens
  source 1..20: mol_type = genomic RNA
taacaagtgcagttggttcc

SEQ ID NO: 91 - RNA, 20 nt, Homo sapiens
  source 1..20: mol_type = genomic RNA
ttgaatacaaacctgataac

SEQ ID NO: 92 - RNA, 20 nt, Homo sapiens
  source 1..20: mol_type = genomic RNA
tgttttagtgagctgagatc

SEQ ID NO: 93 - RNA, 20 nt, Homo sapiens
  source 1..20: mol_type = genomic RNA
taaggtaagtataagaaaga

SEQ ID NO: 94 - RNA, 20 nt, Homo sapiens
  source 1..20: mol_type = genomic RNA
tcaatgatttcttagatatg

SEQ ID NO: 95 - RNA, 20 nt, Homo sapiens
  source 1..20: mol_type = genomic RNA
tagaaaacataggagtaaac

SEQ ID NO: 96 - RNA, 20 nt, Homo sapiens
  source 1..20: mol_type = genomic RNA
tctgggacaactgaataacc

SEQ ID NO: 97 - RNA, 20 nt, Homo sapiens
  source 1..20: mol_type = genomic RNA
tcggaaatgcaagggaccca

SEQ ID NO: 98 - RNA, 20 nt, Homo sapiens
  source 1..20: mol_type = genomic RNA
tttcgtacggaaatgcaagg

SEQ ID NO: 99 - RNA, 20 nt, Homo sapiens
  source 1..20: mol_type = genomic RNA
taataaaattctattggaac

SEQ ID NO: 100 - RNA, 20 nt, Homo sapiens
  source 1..20: mol_type = genomic RNA
taggaaatggaggtgatggg

SEQ ID NO: 101 - RNA, 20 nt, Homo sapiens
  source 1..20: mol_type = genomic RNA
tctctaacatacattctagc

SEQ ID NO: 102 - RNA, 20 nt, Homo sapiens
  source 1..20: mol_type = genomic RNA
gcctgtcctgaattcaccga

SEQ ID NO: 103 - RNA, 20 nt, Homo sapiens
  source 1..20: mol_type = genomic RNA
agtgccacttccctcttcta

SEQ ID NO: 104 - RNA, 20 nt, Homo sapiens
  source 1..20: mol_type = genomic RNA
ggctcttcctacattgtcag

SEQ ID NO: 105 - RNA, 20 nt, Homo sapiens
  source 1..20: mol_type = genomic RNA
tcttcctacattgtcaggac

SEQ ID NO: 106 - RNA, 20 nt, Homo sapiens
  source 1..20: mol_type = genomic RNA
caggacatttcatttagttc

SEQ ID NO: 107 - RNA, 20 nt, Homo sapiens
  source 1..20: mol_type = genomic RNA
ggcatctcagatgtgccagt

SEQ ID NO: 108 - RNA, 20 nt, Homo sapiens
  source 1..20: mol_type = genomic RNA
catctcagatgtgccagtga

SEQ ID NO: 109 - RNA, 20 nt, Homo sapiens
  source 1..20: mol_type = genomic RNA
ggtttctgttgcttgttctt

SEQ ID NO: 110 - RNA, 20 nt, Homo sapiens
  source 1..20: mol_type = genomic RNA
tatgatccttgtctcgtctt

SEQ ID NO: 111 - RNA, 20 nt, Homo sapiens
  source 1..20: mol_type = genomic RNA
cacattgcatgtatcttgtg

SEQ ID NO: 112 - RNA, 20 nt, Homo sapiens
  source 1..20: mol_type = genomic RNA
cttctctttcttatgctgat

SEQ ID NO: 113 - RNA, 20 nt, Homo sapiens
  source 1..20: mol_type = genomic RNA
gacagaacctgcatttgctt

SEQ ID NO: 114 - RNA, 20 nt, Homo sapiens
  source 1..20: mol_type = genomic RNA
acctgcatttgcttatcttc

SEQ ID NO: 115 - RNA, 20 nt, Homo sapiens
  source 1..20: mol_type = genomic RNA
gatagattttgtttcattac

SEQ ID NO: 116 - RNA, 20 nt, Homo sapiens
  source 1..20: mol_type = genomic RNA
gcttacacctttaatccgag

SEQ ID NO: 117 - RNA, 20 nt, Homo sapiens
  source 1..20: mol_type = genomic RNA
gtgaaaccctgtctctacta

SEQ ID NO: 118 - RNA, 20 nt, Homo sapiens
  source 1..20: mol_type = genomic RNA
gaaaccctgtctctactaaa

SEQ ID NO: 119 - RNA, 20 nt, Homo sapiens
  source 1..20: mol_type = genomic RNA
aaaatcgcttgaacccggga

SEQ ID NO: 120 - RNA, 20 nt, Homo sapiens
  source 1..20: mol_type = genomic RNA
gagttgagatcacgccactg

SEQ ID NO: 121 - RNA, 20 nt, Homo sapiens
  source 1..20: mol_type = genomic RNA
gacagagcgagactctatct

SEQ ID NO: 122 - RNA, 20 nt, Homo sapiens
  source 1..20: mol_type = genomic RNA
gtttcaccatgttggccagg

SEQ ID NO: 123 - RNA, 20 nt, Homo sapiens
  source 1..20: mol_type = genomic RNA
gcatgctctgaaatcaactg

SEQ ID NO: 124 - RNA, 20 nt, Homo sapiens
  source 1..20: mol_type = genomic RNA
ctgttcacgtgcttcagcca

SEQ ID NO: 125 - RNA, 20 nt, Homo sapiens
  source 1..20: mol_type = genomic RNA
tcttgctctttggtgtggaa

SEQ ID NO: 126 - RNA, 20 nt, Homo sapiens
  source 1..20: mol_type = genomic RNA
gtcctcacagtaattaggag

SEQ ID NO: 127 - RNA, 20 nt, Homo sapiens
  source 1..20: mol_type = genomic RNA
cctatctggtgtttccctga

SEQ ID NO: 128 - RNA, 20 nt, Homo sapiens
  source 1..20: mol_type = genomic RNA
ggaggaacttcaaagcaggg

SEQ ID NO: 129 - RNA, 20 nt, Homo sapiens
  source 1..20: mol_type = genomic RNA
ttaatcaagtgttaacttat

SEQ ID NO: 130 - RNA, 20 nt, Homo sapiens
  source 1..20: mol_type = genomic RNA
gtgcactagtgtgatcttgg

SEQ ID NO: 131 - RNA, 20 nt, Homo sapiens
  source 1..20: mol_type = genomic RNA
gtttcaccgtgttagccagg

SEQ ID NO: 132 - RNA, 20 nt, Homo sapiens
  source 1..20: mol_type = genomic RNA
tcttgctctttaacccaggc

SEQ ID NO: 133 - RNA, 20 nt, Homo sapiens
  source 1..20: mol_type = genomic RNA
gacctcaagcgagttaagag

SEQ ID NO: 134 - RNA, 20 nt, Homo sapiens
  source 1..20: mol_type = genomic RNA
gatgtcactggaggattaga

SEQ ID NO: 135 - RNA, 20 nt, Homo sapiens
  source 1..20: mol_type = genomic RNA
ggaaccaactgcacttgttg

SEQ ID NO: 136 - RNA, 20 nt, Homo sapiens
  source 1..20: mol_type = genomic RNA
gttatcaggtttgtattcag

SEQ ID NO: 137 - RNA, 20 nt, Homo sapiens
  source 1..20: mol_type = genomic RNA
tctttcttatacttaccttg

SEQ ID NO: 138 - RNA, 20 nt, Homo sapiens
  source 1..20: mol_type = genomic RNA
catatctaagaaatcattgt

SEQ ID NO: 139 - RNA, 20 nt, Homo sapiens
  source 1..20: mol_type = genomic RNA
gtttactcctatgttttctt

SEQ ID NO: 140 - RNA, 20 nt, Homo sapiens
  source 1..20: mol_type = genomic RNA
ggttattcagttgtcccagc

SEQ ID NO: 141 - RNA, 20 nt, Homo sapiens
  source 1..20: mol_type = genomic RNA
tgggtcccttgcatttccgt

SEQ ID NO: 142 - RNA, 20 nt, Homo sapiens
  source 1..20: mol_type = genomic RNA
gctagaatgtatgttagaga

SEQ ID NO: 143 - RNA, 15 nt, Homo sapiens
  source 1..15: mol_type = genomic RNA
catttagttcatgaa

SEQ ID NO: 144 - RNA, 15 nt, Homo sapiens
  source 1..15: mol_type = genomic RNA
cgtttgaatgagtta

SEQ ID NO: 145 - RNA, 15 nt, Homo sapiens
  source 1..15: mol_type = genomic RNA
cagctcactaaaaca

SEQ ID NO: 146 - RNA, 15 nt, Homo sapiens
  source 1..15: mol_type = genomic RNA
catttccgtacgaaa

SEQ ID NO: 147 - RNA, 15 nt, Homo sapiens
  source 1..15: mol_type = genomic RNA
aatagaattttatta

SEQ ID NO: 148 - RNA, 15 nt, Homo sapiens
  source 1..15: mol_type = genomic RNA
cacctccatttccta

SEQ ID NO: 149 - RNA, 20 nt, Mus sp.
  source 1..20: mol_type = genomic RNA
ttccctaacttcgcaaactg

SEQ ID NO: 150 - RNA, 20 nt, Mus sp.
  source 1..20: mol_type = genomic RNA
taagttcgttccctaacttc

SEQ ID NO: 151 - RNA, 20 nt, Mus sp.
  source 1..20: mol_type = genomic RNA
tcaagttcgttccctaactt

SEQ ID NO: 152 - RNA, 20 nt, Mus sp.
  source 1..20: mol_type = genomic RNA
ttctccagaagagagaaaca

SEQ ID NO: 153 - RNA, 20 nt, Mus sp.
  source 1..20: mol_type = genomic RNA
tccagtttctccagaagaga

SEQ ID NO: 154 - RNA, 20 nt, Mus sp.
  source 1..20: mol_type = genomic RNA
tccaagttctcttcacaaca

SEQ ID NO: 155 - RNA, 20 nt, Mus sp.
  source 1..20: mol_type = genomic RNA
ttgaggaggtaaccctagag

SEQ ID NO: 156 - RNA, 20 nt, Mus sp.
  source 1..20: mol_type = genomic RNA
ttatgtcatccactacccgc

SEQ ID NO: 157 - RNA, 20 nt, Mus sp.
  source 1..20: mol_type = genomic RNA
tttatgtcatccactacccg

SEQ ID NO: 158 - RNA, 20 nt, Mus sp.
  source 1..20: mol_type = genomic RNA
ttaaaagcattatgtcatcc

SEQ ID NO: 159 - RNA, 20 nt, Mus sp.
  source 1..20: mol_type = genomic RNA
tccattggatgcgttcacac

SEQ ID NO: 160 - RNA, 20 nt, Mus sp.
  source 1..20: mol_type = genomic RNA
ttcacaggctgcttcaagtg

SEQ ID NO: 161 - RNA, 20 nt, Mus sp.
  source 1..20: mol_type = genomic RNA
tctaaatgaaacgccaggag

SEQ ID NO: 162 - RNA, 20 nt, Mus sp.
  source 1..20: mol_type = genomic RNA
tacaaactaaatgaaacgcc

SEQ ID NO: 163 - RNA, 20 nt, Mus sp.
  source 1..20: mol_type = genomic RNA
tctacactacaccacaaact

SEQ ID NO: 164 - RNA, 20 nt, Mus sp.
  source 1..20: mol_type = genomic RNA
ttaactacactacaccacaa

SEQ ID NO: 165 - RNA, 20 nt, Mus sp.
  source 1..20: mol_type = genomic RNA
tttaactacactacaccaca

SEQ ID NO: 166 - RNA, 20 nt, Mus sp.
  source 1..20: mol_type = genomic RNA
ttttaactacactacaccac

SEQ ID NO: 167 - RNA, 20 nt, Mus sp.
  source 1..20: mol_type = genomic RNA
taacctggtttaactacact

SEQ ID NO: 168 - RNA, 20 nt, Mus sp.
  source 1..20: mol_type = genomic RNA
ttaaaacctggtttaactac

SEQ ID NO: 169 - RNA, 20 nt, Mus sp.
  source 1..20: mol_type = genomic RNA
tttaaaacctggtttaacta

SEQ ID NO: 170 - RNA, 20 nt, Mus sp.
  source 1..20: mol_type = genomic RNA
tcacctctctggctatgctt

SEQ ID NO: 171 - RNA, 20 nt, Mus sp.
  source 1..20: mol_type = genomic RNA
tctcatccaactgcctgcag

SEQ ID NO: 172 - RNA, 20 nt, Mus sp.
  source 1..20: mol_type = genomic RNA
tgtacttgacaaatacaact

SEQ ID NO: 173 - RNA, 15 nt, Mus sp.
  source 1..15: mol_type = genomic RNA
tgcgaagttagggaa

SEQ ID NO: 174 - RNA, 15 nt, Mus sp.
  source 1..15: mol_type = genomic RNA
tagggaacgaactta

SEQ ID NO: 175 - RNA, 15 nt, Mus sp.
  source 1..15: mol_type = genomic RNA
agggaacgaacttga

SEQ ID NO: 176 - RNA, 15 nt, Mus sp.
  source 1..15: mol_type = genomic RNA
ctctcttctggagaa

SEQ ID NO: 177 - RNA, 15 nt, Mus sp.
  source 1..15: mol_type = genomic RNA
tctggagaaactgga

SEQ ID NO: 178 - RNA, 15 nt, Mus sp.
  source 1..15: mol_type = genomic RNA
tgaagagaacttgga

SEQ ID NO: 179 - RNA, 15 nt, Mus sp.
  source 1..15: mol_type = genomic RNA
gggttacctcctcaa

SEQ ID NO: 180 - RNA, 15 nt, Mus sp.
  source 1..15: mol_type = genomic RNA
tagtggatgacataa

SEQ ID NO: 181 - RNA, 15 nt, Mus sp.
  source 1..15: mol_type = genomic RNA
agtggatgacataaa

SEQ ID NO: 182 - RNA, 15 nt, Mus sp.
  source 1..15: mol_type = genomic RNA
acataatgcttttaa

SEQ ID NO: 183 - RNA, 15 nt, Mus sp.
  source 1..15: mol_type = genomic RNA
aacgcatccaatgga

SEQ ID NO: 184 - RNA, 15 nt, Mus sp.
  source 1..15: mol_type = genomic RNA
gaagcagcctgtgaa

SEQ ID NO: 185 - RNA, 15 nt, Mus sp.
  source 1..15: mol_type = genomic RNA
ggcgtttcatttaga

SEQ ID NO: 186 - RNA, 15 nt, Mus sp.
  source 1..15: mol_type = genomic RNA
ttcatttagtttgta

SEQ ID NO: 187 - RNA, 15 nt, Mus sp.
  source 1..15: mol_type = genomic RNA
gtggtgtagtgtaga

SEQ ID NO: 188 - RNA, 15 nt, Mus sp.
  source 1..15: mol_type = genomic RNA
gtgtagtgtagttaa

SEQ ID NO: 189 - RNA, 15 nt, Mus sp.
  source 1..15: mol_type = genomic RNA
tgtagtgtagttaaa

SEQ ID NO: 190 - RNA, 15 nt, Mus sp.
  source 1..15: mol_type = genomic RNA
gtagtgtagttaaaa

SEQ ID NO: 191 - RNA, 15 nt, Mus sp.
  source 1..15: mol_type = genomic RNA
agttaaaccaggtta

SEQ ID NO: 192 - RNA, 15 nt, Mus sp.
  source 1..15: mol_type = genomic RNA
taaaccaggttttaa

SEQ ID NO: 193 - RNA, 15 nt, Mus sp.
  source 1..15: mol_type = genomic RNA
aaaccaggttttaaa

SEQ ID NO: 194 - RNA, 15 nt, Mus sp.
  source 1..15: mol_type = genomic RNA
tagccagagaggtga

SEQ ID NO: 195 - RNA, 15 nt, Mus sp.
  source 1..15: mol_type = genomic RNA
ggcagttggatgaga

SEQ ID NO: 196 - RNA, 15 nt, Mus sp.
  source 1..15: mol_type = genomic RNA
tatttgtcaagtaca

SEQ ID NO: 197 - RNA, 20 nt, synthetic construct
  source 1..20: mol_type = other RNA
  modified_base 1: mod_base = OTHER; note = 5' phosphate 2'-O-methyl uridine phosphorothioate
  modified_base 2: mod_base = OTHER; note = 2'-fluoro uridine phosphorothioate
  modified_base 3: mod_base = OTHER; note = 2'-O-methyl cytosine
  modified_base 4: mod_base = OTHER; note = 2'-fluoro adenosine
  modified_base 5: mod_base = OTHER; note = 2'-O-methyl uridine
  modified_base 6: mod_base = OTHER; note = 2'-fluoro cytosine
  modified_base 7: mod_base = OTHER; note = 2'-O-methyl adenosine
  modified_base 8: mod_base = OTHER; note = 2'-fluoro guanosine
  modified_base 9: mod_base = OTHER; note = 2'-O-methyl cytosine
  modified_base 10: mod_base = OTHER; note = 2'-fluoro uridine
  modified_base 11: mod_base = OTHER; note = 2'-O-methyl uridine
  modified_base 12: mod_base = OTHER; note = 2'-fluoro uridine
  modified_base 13: mod_base = OTHER; note = 2'-O-methyl uridine phosphorothioate
  modified_base 14: mod_base = OTHER; note = 2'-fluoro cytosine phosphorothioate
  modified_base 15: mod_base = OTHER; note = 2'-O-methyl cytosine phosphorothioate
  modified_base 16: mod_base = OTHER; note = 2'-fluoro adenosine phosphorothioate
  modified_base 17: mod_base = OTHER; note = 2'-O-methyl guanosine phosphorothioate
  modified_base 18: mod_base = OTHER; note = 2'-fluoro guanosine phosphorothioate
  modified_base 19: mod_base = OTHER; note = 2'-O-methyl guanosine phosphorothioate
  modified_base 20: mod_base = OTHER; note = 2'-fluoro uridine
ttcatcagcttttccagggt

SEQ ID NO: 198 - RNA, 20 nt, synthetic construct
  source 1..20: mol_type = other RNA
  modified_base 1: mod_base = OTHER; note = 5' phosphate 2'-O-methyl uridine phosphorothioate
  modified_base 2: mod_base = OTHER; note = 2'-fluoro uridine phosphorothioate
  modified_base 3: mod_base = OTHER; note = 2'-O-methyl guanosine
  modified_base 4: mod_base = OTHER; note = 2'-fluoro adenosine
  modified_base 5: mod_base = OTHER; note = 2'-O-methyl guanosine
  modified_base 6: mod_base = OTHER; note = 2'-fluoro guanosine
  modified_base 7: mod_base = OTHER; note = 2'-O-methyl guanosine
  modified_base 8: mod_base = OTHER; note = 2'-fluoro adenosine
  modified_base 9: mod_base = OTHER; note = 2'-O-methyl cytosine
  modified_base 10: mod_base = OTHER; note = 2'-fluoro uridine
  modified_base 11: mod_base = OTHER; note = 2'-O-methyl cytosine
  modified_base 12: mod_base = OTHER; note = 2'-fluoro guanosine
  modified_base 13: mod_base = OTHER; note = 2'-O-methyl adenosine phosphorothioate
  modified_base 14: mod_base = OTHER; note = 2'-fluoro adenosine phosphorothioate
  modified_base 15: mod_base = OTHER; note = 2'-O-methyl guanosine phosphorothioate
  modified_base 16: mod_base = OTHER; note = 2'-fluoro guanosine phosphorothioate
  modified_base 17: mod_base = OTHER; note = 2'-O-methyl cytosine phosphorothioate
  modified_base 18: mod_base = OTHER; note = 2'-fluoro cytosine phosphorothioate
  modified_base 19: mod_base = OTHER; note = 2'-O-methyl uridine phosphorothioate
  modified_base 20: mod_base = OTHER; note = 2'-fluoro uridine
ttgagggactcgaaggcctt

SEQ ID NO: 199 - RNA, 20 nt, synthetic construct
  source 1..20: mol_type = other RNA
  modified_base 1: mod_base = OTHER; note = 5' phosphate 2'-O-methyl uridine phosphorothioate
  modified_base 2: mod_base = OTHER; note = 2'-fluoro cytosine phosphorothioate
  modified_base 3: mod_base = OTHER; note = 2'-O-methyl uridine
  modified_base 4: mod_base = OTHER; note = 2'-fluoro guanosine
  modified_base 5: mod_base = OTHER; note = 2'-O-methyl cytosine
  modified_base 6: mod_base = OTHER; note = 2'-fluoro uridine
  modified_base 7: mod_base = OTHER; note = 2'-O-methyl guanosine
  modified_base 8: mod_base = OTHER; note = 2'-fluoro cytosine
  modified_base 9: mod_base = OTHER; note = 2'-O-methyl uridine
  modified_base 10: mod_base = OTHER; note = 2'-fluoro guanosine
  modified_base 11: mod_base = OTHER; note = 2'-O-methyl cytosine
  modified_base 12: mod_base = OTHER; note = 2'-fluoro uridine
  modified_base 13: mod_base = OTHER; note = 2'-O-methyl guanosine phosphorothioate
  modified_base 14: mod_base = OTHER; note = 2'-fluoro cytosine phosphorothioate
  modified_base 15: mod_base = OTHER; note = 2'-O-methyl uridine phosphorothioate
  modified_base 16: mod_base = OTHER; note = 2'-fluoro guanosine phosphorothioate
  modified_base 17: mod_base = OTHER; note = 2'-O-methyl cytosine phosphorothioate
  modified_base 18: mod_base = OTHER; note = 2'-fluoro uridine phosphorothioate
  modified_base 19: mod_base = OTHER; note = 2'-O-methyl guanosine phosphorothioate
  modified_base 20: mod_base = OTHER; note = 2'-fluoro cytosine
tctgctgctgctgctgctgc

SEQ ID NO: 200 - RNA, 20 nt, synthetic construct
  source 1..20: mol_type = other RNA
  modified_base 1: mod_base = OTHER; note = 5' phosphate 2'-O-methyl uridine phosphorothioate
  modified_base 2: mod_base = OTHER; note = 2'-fluoro uridine phosphorothioate
  modified_base 3: mod_base = OTHER; note = 2'-O-methyl uridine
  modified_base 4: mod_base = OTHER; note = 2'-fluoro cytosine
  modified_base 5: mod_base = OTHER; note = 2'-O-methyl uridine
  modified_base 6: mod_base = OTHER; note = 2'-fluoro uridine
  modified_base 7: mod_base = OTHER; note = 2'-O-methyl uridine
  modified_base 8: mod_base = OTHER; note = 2'-fluoro guanosine
  modified_base 9: mod_base = OTHER; note = 2'-O-methyl guanosine
  modified_base 10: mod_base = OTHER; note = 2'-fluoro uridine
  modified_base 11: mod_base = OTHER; note = 2'-O-methyl cytosine
  modified_base 12: mod_base = OTHER; note = 2'-fluoro guanosine
  modified_base 13: mod_base = OTHER; note = 2'-O-methyl guanosine phosphorothioate
  modified_base 14: mod_base = OTHER; note = 2'-fluoro uridine phosphorothioate
  modified_base 15: mod_base = OTHER; note = 2'-O-methyl guanosine phosphorothioate
  modified_base 16: mod_base = OTHER; note = 2'-fluoro cytosine phosphorothioate
  modified_base 17: mod_base = OTHER; note = 2'-O-methyl adenosine phosphorothioate
  modified_base 18: mod_base = OTHER; note = 2'-fluoro guanosine phosphorothioate
  modified_base 19: mod_base = OTHER; note = 2'-O-methyl cytosine phosphorothioate
  modified_base 20: mod_base = OTHER; note = 2'-fluoro guanosine
tttctttggtcggtgcagcg

SEQ ID NO: 201 - RNA, 20 nt, synthetic construct
  source 1..20: mol_type = other RNA
  modified_base 1: mod_base = OTHER; note = 5' phosphate 2'-O-methyl uridine phosphorothioate
  modified_base 2: mod_base = OTHER; note = 2'-fluoro uridine phosphorothioate
  modified_base 3: mod_base = OTHER; note = 2'-O-methyl uridine
  modified_base 4: mod_base = OTHER; note = 2'-fluoro guanosine
  modified_base 5: mod_base = OTHER; note = 2'-O-methyl guanosine
  modified_base 6: mod_base = OTHER; note = 2'-fluoro uridine
  modified_base 7: mod_base = OTHER; note = 2'-O-methyl adenosine
  modified_base 8: mod_base = OTHER; note = 2'-fluoro guanosine
  modified_base 9: mod_base = OTHER; note = 2'-O-methyl cytosine
  modified_base 10: mod_base = OTHER; note = 2'-fluoro uridine
  modified_base 11: mod_base = OTHER; note = 2'-O-methyl guanosine
  modified_base 12: mod_base = OTHER; note = 2'-fluoro adenosine
  modified_base 13: mod_base = OTHER; note = 2'-O-methyl adenosine phosphorothioate
  modified_base 14: mod_base = OTHER; note = 2'-fluoro adenosine phosphorothioate
  modified_base 15: mod_base = OTHER; note = 2'-O-methyl guanosine phosphorothioate
  modified_base 16: mod_base = OTHER; note = 2'-fluoro uridine phosphorothioate
  modified_base 17: mod_base = OTHER; note = 2'-O-methyl uridine phosphorothioate
  modified_base 18: mod_base = OTHER; note = 2'-fluoro cytosine phosphorothioate
  modified_base 19: mod_base = OTHER; note = 2'-O-methyl uridine phosphorothioate
  modified_base 20: mod_base = OTHER; note = 2'-fluoro uridine
tttggtagctgaaagttctt

SEQ ID NO: 202 - RNA, 20 nt, synthetic construct
  source 1..20: mol_type = other RNA
  modified_base 1: mod_base = OTHER; note = 5' phosphate 2'-O-methyl uridine phosphorothioate
  modified_base 2: mod_base = OTHER; note = 2'-fluoro adenosine phosphorothioate
  modified_base 3: mod_base = OTHER; note = 2'-O-methyl cytosine
  modified_base 4: mod_base = OTHER; note = 2'-fluoro guanosine
  modified_base 5: mod_base = OTHER; note = 2'-O-methyl guanosine
  modified_base 6: mod_base = OTHER; note = 2'-fluoro uridine
  modified_base 7: mod_base = OTHER; note = 2'-O-methyl cytosine
  modified_base 8: mod_base = OTHER; note = 2'-fluoro uridine
  modified_base 9: mod_base = OTHER; note = 2'-O-methyl uridine
  modified_base 10: mod_base = OTHER; note = 2'-fluoro uridine
  modified_base 11: mod_base = OTHER; note = 2'-O-methyl cytosine
  modified_base 12: mod_base = OTHER; note = 2'-fluoro uridine
  modified_base 13: mod_base = OTHER; note = 2'-O-methyl uridine phosphorothioate
  modified_base 14: mod_base = OTHER; note = 2'-fluoro guanosine phosphorothioate
  modified_base 15: mod_base = OTHER; note = 2'-O-methyl guanosine phosphorothioate
  modified_base 16: mod_base = OTHER; note = 2'-fluoro uridine phosphorothioate
  modified_base 17: mod_base = OTHER; note = 2'-O-methyl adenosine phosphorothioate
  modified_base 18: mod_base = OTHER; note = 2'-fluoro guanosine phosphorothioate
  modified_base 19: mod_base = OTHER; note = 2'-O-methyl cytosine phosphorothioate
  modified_base 20: mod_base = OTHER; note = 2'-fluoro uridine
tacggtctttcttggtagct

SEQ ID NO: 203 - RNA, 20 nt, synthetic construct
  source 1..20: mol_type = other RNA
  modified_base 1: mod_base = OTHER; note = 5' phosphate 2'-O-methyl uridine phosphorothioate
  modified_base 2: mod_base = OTHER; note = 2'-fluoro uridine phosphorothioate
  modified_base 3: mod_base = OTHER; note = 2'-O-methyl cytosine
  modified_base 4: mod_base = OTHER; note = 2'-fluoro adenosine
  modified_base 5: mod_base = OTHER; note = 2'-O-methyl guanosine
  modified_base 6: mod_base = OTHER; note = 2'-fluoro adenosine
  modified_base 7: mod_base = OTHER; note = 2'-O-methyl cytosine
  modified_base 8: mod_base = OTHER; note = 2'-fluoro adenosine
  modified_base 9: mod_base = OTHER; note = 2'-O-methyl adenosine
  modified_base 10: mod_base = OTHER; note = 2'-fluoro uridine
  modified_base 11: mod_base = OTHER; note = 2'-O-methyl guanosine
  modified_base 12: mod_base = OTHER; note = 2'-fluoro adenosine
  modified_base 13: mod_base = OTHER; note = 2'-O-methyl uridine phosphorothioate
  modified_base 14: mod_base = OTHER; note = 2'-fluoro uridine phosphorothioate
  modified_base 15: mod_base = OTHER; note = 2'-O-methyl cytosine phosphorothioate
  modified_base 16: mod_base = OTHER; note = 2'-fluoro adenosine phosphorothioate
  modified_base 17: mod_base = OTHER; note = 2'-O-methyl cytosine phosphorothioate
  modified_base 18: mod_base = OTHER; note = 2'-fluoro adenosine phosphorothioate
  modified_base 19: mod_base = OTHER; note = 2'-O-methyl cytosine phosphorothioate
  modified_base 20: mod_base = OTHER; note = 2'-fluoro guanosine
ttcagacaatgattcacacg

SEQ ID NO: 204 - RNA, 20 nt, synthetic construct
  source 1..20: mol_type = other RNA
  modified_base 1: mod_base = OTHER; note = 5' phosphate 2'-O-methyl uridine phosphorothioate
  modified_base 2: mod_base = OTHER; note = 2'-fluoro adenosine phosphorothioate
  modified_base 3: mod_base = OTHER; note = 2'-O-methyl cytosine
  modified_base 4: mod_base = OTHER; note = 2'-fluoro adenosine
  modified_base 5: mod_base = OTHER; note = 2'-O-methyl uridine
  modified_base 6: mod_base = OTHER; note = 2'-fluoro adenosine
  modified_base 7: mod_base = OTHER; note = 2'-O-methyl uridine
  modified_base 8: mod_base = OTHER; note = 2'-fluoro uridine
  modified_base 9: mod_base = OTHER; note = 2'-O-methyl guanosine
  modified_base 10: mod_base = OTHER; note = 2'-fluoro uridine
  modified_base 11: mod_base = OTHER; note = 2'-O-methyl cytosine
  modified_base 12: mod_base = OTHER; note = 2'-fluoro adenosine
  modified_base 13: mod_base = OTHER; note = 2'-O-methyl guanosine phosphorothioate
  modified_base 14: mod_base = OTHER; note = 2'-fluoro adenosine phosphorothioate
  modified_base 15: mod_base = OTHER; note = 2'-O-methyl cytosine phosphorothioate
  modified_base 16: mod_base = OTHER; note = 2'-fluoro adenosine phosphorothioate
  modified_base 17: mod_base = OTHER; note = 2'-O-methyl adenosine phosphorothioate
  modified_base 18: mod_base = OTHER; note = 2'-fluoro uridine phosphorothioate
  modified_base 19: mod_base = OTHER; note = 2'-O-methyl guanosine phosphorothioate
  modified_base 20: mod_base = OTHER; note = 2'-fluoro adenosine
tacatattgtcagacaatga

SEQ ID NO: 205 - RNA, 20 nt, synthetic construct
  source 1..20: mol_type = other RNA
  modified_base 1: mod_base = OTHER; note = 5' phosphate 2'-O-methyl uridine phosphorothioate
  modified_base 2: mod_base = OTHER; note = 2'-fluoro adenosine phosphorothioate
  modified_base 3: mod_base = OTHER; note = 2'-O-methyl uridine
  modified_base 4: mod_base = OTHER; note = 2'-fluoro guanosine
  modified_base 5: mod_base = OTHER; note = 2'-O-methyl uridine
  modified_base 6: mod_base = OTHER; note = 2'-fluoro uridine
  modified_base 7: mod_base = OTHER; note = 2'-O-methyl uridine
  modified_base 8: mod_base = OTHER; note = 2'-fluoro uridine
  modified_base 9: mod_base = OTHER; note = 2'-O-methyl cytosine
  modified_base 10: mod_base = OTHER; note = 2'-fluoro adenosine
  modified_base 11: mod_base = OTHER; note = 2'-O-methyl cytosine
  modified_base 12: mod_base = OTHER; note = 2'-fluoro adenosine
  modified_base 13: mod_base = OTHER; note = 2'-O-methyl uridine phosphorothioate
  modified_base 14: mod_base = OTHER; note = 2'-fluoro adenosine phosphorothioate
  modified_base 15: mod_base = OTHER; note = 2'-O-methyl uridine phosphorothioate
  modified_base 16: mod_base = OTHER; note = 2'-fluoro uridine phosphorothioate
  modified_base 17: mod_base = OTHER; note = 2'-O-methyl guanosine phosphorothioate
  modified_base 18: mod_base = OTHER; note = 2'-fluoro uridine phosphorothioate
  modified_base 19: mod_base = OTHER; note = 2'-O-methyl cytosine phosphorothioate
  modified_base 20: mod_base = OTHER; note = 2'-fluoro adenosine
tatgttttcacatattgtca

SEQ ID NO: 206 - RNA, 20 nt, synthetic construct
  source 1..20: mol_type = other RNA
  modified_base 1: mod_base = OTHER; note = 5' phosphate 2'-O-methyl uridine phosphorothioate
  modified_base 2: mod_base = OTHER; note = 2'-fluoro cytosine phosphorothioate
  modified_base 3: mod_base = OTHER; note = 2'-O-methyl cytosine
  modified_base 4: mod_base = OTHER; note = 2'-fluoro adenosine
  modified_base 5: mod_base = OTHER; note = 2'-O-methyl cytosine
  modified_base 6: mod_base = OTHER; note = 2'-fluoro uridine
  modified_base 7: mod_base = OTHER; note = 2'-O-methyl adenosine
  modified_base 8: mod_base = OTHER; note = 2'-fluoro uridine
  modified_base 9: mod_base = OTHER; note = 2'-O-methyl guanosine
  modified_base 10: mod_base = OTHER; note = 2'-fluoro uridine
  modified_base 11: mod_base = OTHER; note = 2'-O-methyl uridine
  modified_base 12: mod_base = OTHER; note = 2'-fluoro uridine
  modified_base 13: mod_base = OTHER; note = 2'-O-methyl uridine phosphorothioate
  modified_base 14: mod_base = OTHER; note = 2'-fluoro cytosine phosphorothioate
  modified_base 15: mod_base = OTHER; note = 2'-O-methyl adenosine phosphorothioate
  modified_base 16: mod_base = OTHER; note = 2'-fluoro cytosine phosphorothioate
  modified_base 17: mod_base = OTHER; note = 2'-O-methyl adenosine phosphorothioate
  modified_base 18: mod_base = OTHER; note = 2'-fluoro uridine phosphorothioate
  modified_base 19: mod_base = OTHER; note = 2'-O-methyl adenosine phosphorothioate
  modified_base 20: mod_base = OTHER; note = 2'-fluoro uridine
tccactatgttttcacatat

SEQ ID NO: 207 - RNA, 15 nt, synthetic construct
  source 1..15: mol_type = other RNA
  modified_base 1: mod_base = OTHER; note = 2'-fluoro guanosine phosphorothioate
  modified_base 2: mod_base = OTHER; note = 2'-O-methyl guanosine phosphorothioate
  modified_base 3: mod_base = OTHER; note = 2'-fluoro adenosine
  modified_base 4: mod_base = OTHER; note = 2'-O-methyl adenosine
  modified_base 5: mod_base = OTHER; note = 2'-fluoro adenosine
  modified_base 6: mod_base = OTHER; note = 2'-O-methyl adenosine
  modified_base 7: mod_base = OTHER; note = 2'-fluoro guanosine
  modified_base 8: mod_base = OTHER; note = 2'-O-methyl cytosine
  modified_base 9: mod_base = OTHER; note = 2'-fluoro uridine
  modified_base 10: mod_base = OTHER; note = 2'-O-methyl guanosine
  modified_base 11: mod_base = OTHER; note = 2'-fluoro adenosine
  modified_base 12: mod_base = OTHER; note = 2'-O-methyl uridine
  modified_base 13: mod_base = OTHER; note = 2'-fluoro guanosine phosphorothioate
  modified_base 14: mod_base = OTHER; note = 2'-O-methyl adenosine phosphorothioate
  modified_base 15: mod_base = OTHER; note = 2'-fluoro adenosine triethylene glycol
ggaaaagctgatgaa

SEQ ID NO: 208 - RNA, 15 nt, synthetic construct
  source 1..15: mol_type = other RNA
  modified_base 1: mod_base = OTHER; note = 2'-fluoro cytosine phosphorothioate
  modified_base 2: mod_base = OTHER; note = 2'-O-methyl uridine phosphorothioate
  modified_base 3: mod_base = OTHER; note = 2'-fluoro uridine
  modified_base 4: mod_base = OTHER; note = 2'-O-methyl cytosine
  modified_base 5: mod_base = OTHER; note = 2'-fluoro guanosine
  modified_base 6: mod_base = OTHER; note = 2'-O-methyl adenosine
  modified_base 7: mod_base = OTHER; note = 2'-fluoro guanosine
  modified_base 8: mod_base = OTHER; note = 2'-O-methyl uridine
  modified_base 9: mod_base = OTHER; note = 2'-fluoro cytosine
  modified_base 10: mod_base = OTHER; note = 2'-O-methyl cytosine
  modified_base 11: mod_base = OTHER; note = 2'-fluoro cytosine
  modified_base 12: mod_base = OTHER; note = 2'-O-methyl uridine
  modified_base 13: mod_base = OTHER; note = 2'-fluoro cytosine phosphorothioate
  modified_base 14: mod_base = OTHER; note = 2'-O-methyl adenosine phosphorothioate
  modified_base 15: mod_base = OTHER; note = 2'-fluoro adenosine triethylene glycol
cttcgagtccctcaa

SEQ ID NO: 209 - RNA, 15 nt, synthetic construct
  source 1..15: mol_type = other RNA
  modified_base 1: mod_base = OTHER; note = 2'-fluoro adenosine phosphorothioate
  modified_base 2: mod_base = OTHER; note = 2'-O-methyl guanosine phosphorothioate
  modified_base 3: mod_base = OTHER; note = 2'-fluoro cytosine
  modified_base 4: mod_base = OTHER; note = 2'-O-methyl adenosine
  modified_base 5: mod_base = OTHER; note = 2'-fluoro guanosine
  modified_base 6: mod_base = OTHER; note = 2'-O-methyl cytosine
  modified_base 7: mod_base = OTHER; note = 2'-fluoro adenosine
  modified_base 8: mod_base = OTHER; note = 2'-O-methyl guanosine
  modified_base 9: mod_base = OTHER; note = 2'-fluoro cytosine
  modified_base 10: mod_base = OTHER; note = 2'-O-methyl adenosine
  modified_base 11: mod_base = OTHER; note = 2'-fluoro guanosine
  modified_base 12: mod_base = OTHER; note = 2'-O-methyl cytosine
  modified_base 13: mod_base = OTHER; note = 2'-fluoro adenosine phosphorothioate
  modified_base 14: mod_base = OTHER; note = 2'-O-methyl guanosine phosphorothioate
  modified_base 15: mod_base = OTHER; note = 2'-fluoro adenosine triethylene glycol
agcagcagcagcaga

SEQ ID NO: 210 - RNA, 15 nt, synthetic construct
  source 1..15: mol_type = other RNA
  modified_base 1: mod_base = OTHER; note = 2'-fluoro cytosine phosphorothioate
  modified_base 2: mod_base = OTHER; note = 2'-O-methyl adenosine phosphorothioate
  modified_base 3: mod_base = OTHER; note = 2'-fluoro cytosine
  modified_base 4: mod_base = OTHER; note = 2'-O-methyl cytosine
  modified_base 5: mod_base = OTHER; note = 2'-fluoro guanosine
  modified_base 6: mod_base = OTHER; note = 2'-O-methyl adenosine
  modified_base 7: mod_base = OTHER; note = 2'-fluoro cytosine
  modified_base 8: mod_base = OTHER; note = 2'-O-methyl cytosine
  modified_base 9: mod_base = OTHER; note = 2'-fluoro adenosine
  modified_base 10: mod_base = OTHER; note = 2'-O-methyl adenosine
  modified_base 11: mod_base = OTHER; note = 2'-fluoro adenosine
  modified_base 12: mod_base = OTHER; note = 2'-O-methyl guanosine
  modified_base 13: mod_base = OTHER; note = 2'-fluoro adenosine phosphorothioate
  modified_base 14: mod_base = OTHER; note = 2'-O-methyl adenosine phosphorothioate
  modified_base 15: mod_base = OTHER; note = 2'-fluoro adenosine triethylene glycol
caccgaccaaagaaa

SEQ ID NO: 211 - RNA, 15 nt, synthetic construct
  source 1..15: mol_type = other RNA
  modified_base 1: mod_base = OTHER; note = 2'-fluoro cytosine phosphorothioate
  modified_base 2: mod_base = OTHER; note = 2'-O-methyl uridine phosphorothioate
  modified_base 3: mod_base = OTHER; note = 2'-fluoro uridine
  modified_base 4: mod_base = OTHER; note = 2'-O-methyl uridine
  modified_base 5: mod_base = OTHER; note = 2'-fluoro cytosine
  modified_base 6: mod_base = OTHER; note = 2'-O-methyl adenosine
  modified_base 7: mod_base = OTHER; note = 2'-fluoro guanosine
  modified_base 8: mod_base = OTHER; note = 2'-O-methyl cytosine
  modified_base 9: mod_base = OTHER; note = 2'-fluoro uridine
  modified_base 10: mod_base = OTHER; note = 2'-O-methyl adenosine
  modified_base 11: mod_base = OTHER; note = 2'-fluoro cytosine
  modified_base 12: mod_base = OTHER; note = 2'-O-methyl cytosine
  modified_base 13: mod_base = OTHER; note = 2'-fluoro adenosine phosphorothioate
  modified_base 14: mod_base = OTHER; note = 2'-O-methyl adenosine phosphorothioate
  modified_base 15: mod_base = OTHER; note = 2'-fluoro adenosine triethylene glycol
ctttcagctaccaaa

SEQ ID NO: 212 - RNA, 15 nt, synthetic construct
  source 1..15: mol_type = other RNA
  modified_base 1: mod_base = OTHER; note = 2'-fluoro cytosine phosphorothioate
  modified_base 2: mod_base = OTHER; note = 2'-O-methyl cytosine phosphorothioate
  modified_base 3: mod_base = OTHER; note = 2'-fluoro adenosine
  modified_base 4: mod_base = OTHER; note = 2'-O-methyl adenosine
  modified_base 5: mod_base = OTHER; note = 2'-fluoro guanosine
  modified_base 6: mod_base = OTHER; note = 2'-O-methyl adenosine
  modified_base 7: mod_base = OTHER; note = 2'-fluoro adenosine
  modified_base 8: mod_base = OTHER; note = 2'-O-methyl adenosine
  modified_base 9: mod_base = OTHER; note = 2'-fluoro guanosine
  modified_base 10: mod_base = OTHER; note = 2'-O-methyl adenosine
  modified_base 11: mod_base = OTHER; note = 2'-fluoro cytosine
  modified_base 12: mod_base = OTHER; note = 2'-O-methyl cytosine
  modified_base 13: mod_base = OTHER; note = 2'-fluoro guanosine phosphorothioate
  modified_base 14: mod_base = OTHER; note = 2'-O-methyl uridine phosphorothioate
  modified_base 15: mod_base = OTHER; note = 2'-fluoro adenosine triethylene glycol
ccaagaaagaccgta

SEQ ID NO: 213 - RNA, 15 nt, synthetic construct
  source 1..15: mol_type = other RNA
  modified_base 1: mod_base = OTHER; note = 2'-fluoro guanosine phosphorothioate
  modified_base 2: mod_base = OTHER; note = 2'-O-methyl adenosine phosphorothioate
  modified_base 3: mod_base = OTHER; note = 2'-fluoro adenosine
  modified_base 4: mod_base = OTHER; note = 2'-O-methyl uridine
  modified_base 5: mod_base = OTHER; note = 2'-fluoro cytosine
  modified_base 6: mod_base = OTHER; note = 2'-O-methyl adenosine
  modified_base 7: mod_base = OTHER; note = 2'-fluoro uridine
  modified_base 8: mod_base = OTHER; note = 2'-O-methyl uridine
  modified_base 9: mod_base = OTHER; note = 2'-fluoro guanosine
  modified_base 10: mod_base = OTHER; note = 2'-O-methyl uridine
  modified_base 11: mod_base = OTHER; note = 2'-fluoro cytosine
  modified_base 12: mod_base = OTHER; note = 2'-O-methyl uridine
  modified_base 13: mod_base = OTHER; note = 2'-fluoro guanosine phosphorothioate
  modified_base 14: mod_base = OTHER; note = 2'-O-methyl adenosine phosphorothioate
  modified_base 15: mod_base = OTHER; note = 2'-fluoro adenosine triethylene glycol
gaatcattgtctgaa

SEQ ID NO: 214 - RNA, 15 nt, synthetic construct
  source 1..15: mol_type = other RNA
  modified_base 1: mod_base = OTHER; note = 2'-fluoro guanosine phosphorothioate
  modified_base 2: mod_base = OTHER; note = 2'-O-methyl uridine phosphorothioate
  modified_base 3: mod_base = OTHER; note = 2'-fluoro cytosine
  modified_base 4: mod_base = OTHER; note = 2'-O-methyl uridine
  modified_base 5: mod_base = OTHER; note = 2'-fluoro guanosine
  modified_base 6: mod_base = OTHER; note = 2'-O-methyl adenosine
  modified_base 7: mod_base = OTHER; note = 2'-fluoro cytosine
  modified_base 8: mod_base = OTHER; note = 2'-O-methyl adenosine
  modified_base 9: mod_base = OTHER; note = 2'-fluoro adenosine
  modified_base 10: mod_base = OTHER; note = 2'-O-methyl uridine
  modified_base 11: mod_base = OTHER; note = 2'-fluoro adenosine
  modified_base 12: mod_base = OTHER; note = 2'-O-methyl uridine
  modified_base 13: mod_base = OTHER; note = 2'-fluoro guanosine phosphorothioate
  modified_base 14: mod_base = OTHER; note = 2'-O-methyl uridine phosphorothioate
  modified_base 15: mod_base = OTHER; note = 2'-fluoro adenosine triethylene glycol
gtctgacaatatgta

SEQ ID NO: 215 - RNA, 15 nt, synthetic construct
  source 1..15: mol_type = other RNA
  modified_base 1: mod_base = OTHER; note = 2'-fluoro adenosine phosphorothioate
  modified_base 2: mod_base = OTHER; note = 2'-O-methyl uridine phosphorothioate
  modified_base 3: mod_base = OTHER; note = 2'-fluoro adenosine
  modified_base 4: mod_base = OTHER; note = 2'-O-methyl uridine
  modified_base 5: mod_base = OTHER; note = 2'-fluoro guanosine
  modified_base 6: mod_base = OTHER; note = 2'-O-methyl uridine
  modified_base 7: mod_base = OTHER; note = 2'-fluoro guanosine
  modified_base 8: mod_base = OTHER; note = 2'-O-methyl adenosine
  modified_base 9: mod_base = OTHER; note = 2'-fluoro adenosine
  modified_base 10: mod_base = OTHER; note = 2'-O-methyl adenosine
  modified_base 11: mod_base = OTHER; note = 2'-fluoro adenosine
  modified_base 12: mod_base = OTHER; note = 2'-O-methyl cytosine
  modified_base 13: mod_base = OTHER; note = 2'-fluoro adenosine phosphorothioate
  modified_base 14: mod_base = OTHER; note = 2'-O-methyl uridine phosphorothioate
  modified_base 15: mod_base = OTHER; note = 2'-fluoro adenosine triethylene glycol
atatgtgaaaacata

SEQ ID NO: 216 - RNA, 15 nt, synthetic construct
  source 1..15: mol_type = other RNA
  modified_base 1: mod_base = OTHER; note = 2'-fluoro uridine phosphorothioate
  modified_base 2: mod_base = OTHER; note = 2'-O-methyl guanosine phosphorothioate
  modified_base 3: mod_base = OTHER; note = 2'-fluoro adenosine
  modified_base 4: mod_base = OTHER; note = 2'-O-methyl adenosine
  modified_base 5: mod_base = OTHER; note = 2'-fluoro adenosine
  modified_base 6: mod_base = OTHER; note = 2'-O-methyl adenosine
  modified_base 7: mod_base = OTHER; note = 2'-fluoro cytosine
  modified_base 8: mod_base = OTHER; note = 2'-O-methyl adenosine
  modified_base 9: mod_base = OTHER; note = 2'-fluoro uridine
  modified_base 10: mod_base = OTHER; note = 2'-O-methyl adenosine
  modified_base 11: mod_base = OTHER; note = 2'-fluoro guanosine
  modified_base 12: mod_base = OTHER; note = 2'-O-methyl uridine
  modified_base 13: mod_base = OTHER; note = 2'-fluoro guanosine phosphorothioate
  modified_base 14: mod_base = OTHER; note = 2'-O-methyl guanosine phosphorothioate
  modified_base 15: mod_base = OTHER; note = 2'-fluoro adenosine triethylene glycol
tgaaaacatagtgga

SEQ ID NO: 217 - RNA, 20 nt, synthetic construct
  source 1..20: mol_type = other RNA
  modified_base 1: mod_base = OTHER; note = 5' phosphate 2'-O-methyl uridine phosphorothioate
  modified_base 2: mod_base = OTHER; note = 2'-fluoro adenosine phosphorothioate
  modified_base 3: mod_base = OTHER; note = 2'-O-methyl adenosine
  modified_base 4: mod_base = OTHER; note = 2'-fluoro guanosine
  modified_base 5: mod_base = OTHER; note = 2'-O-methyl uridine
  modified_base 6: mod_base = OTHER; note = 2'-fluoro uridine
  modified_base 7: mod_base = OTHER; note = 2'-O-methyl cytosine
  modified_base 8: mod_base = OTHER; note = 2'-fluoro guanosine
  modified_base 9: mod_base = OTHER; note = 2'-O-methyl uridine
  modified_base 10: mod_base = OTHER; note = 2'-fluoro uridine
  modified_base 11: mod_base = OTHER; note = 2'-O-methyl cytosine
  modified_base 12: mod_base = OTHER; note = 2'-fluoro cytosine
  modified_base 13: mod_base = OTHER; note = 2'-O-methyl cytosine phosphorothioate
  modified_base 14: mod_base = OTHER; note = 2'-fluoro uridine phosphorothioate
  modified_base 15: mod_base = OTHER; note = 2'-O-methyl adenosine phosphorothioate
  modified_base 16: mod_base = OTHER; note = 2'-fluoro adenosine phosphorothioate
  modified_base 17: mod_base = OTHER; note = 2'-O-methyl cytosine phosphorothioate
  modified_base 18: mod_base = OTHER; note = 2'-fluoro uridine phosphorothioate
  modified_base 19: mod_base = OTHER; note = 2'-O-methyl uridine phosphorothioate
  modified_base 20: mod_base = OTHER; note = 2'-fluoro cytosine
taagttcgttccctaacttc

SEQ ID NO: 218 - RNA, 20 nt, synthetic construct
  source 1..20: mol_type = other RNA
  modified_base 1: mod_base = OTHER; note = 5' phosphate 2'-O-methyl uridine phosphorothioate
  modified_base 2: mod_base = OTHER; note = 2'-fluoro cytosine phosphorothioate
  modified_base 3: mod_base = OTHER; note = 2'-O-methyl adenosine
  modified_base 4: mod_base = OTHER; note = 2'-fluoro adenosine
  modified_base 5: mod_base = OTHER; note = 2'-O-methyl guanosine
  modified_base 6: mod_base = OTHER; note = 2'-fluoro uridine
  modified_base 7: mod_base = OTHER; note = 2'-O-methyl uridine
  modified_base 8: mod_base = OTHER; note = 2'-fluoro cytosine
  modified_base 9: mod_base = OTHER; note = 2'-O-methyl guanosine
  modified_base 10: mod_base = OTHER; note = 2'-fluoro uridine
  modified_base 11: mod_base = OTHER; note = 2'-O-methyl uridine
  modified_base 12: mod_base = OTHER; note = 2'-fluoro cytosine
  modified_base 13: mod_base = OTHER; note = 2'-O-methyl cytosine phosphorothioate
  modified_base 14: mod_base = OTHER; note = 2'-fluoro cytosine phosphorothioate
  modified_base 15: mod_base = OTHER; note = 2'-O-methyl uridine phosphorothioate
  modified_base 16: mod_base = OTHER; note = 2'-fluoro adenosine phosphorothioate
  modified_base 17: mod_base = OTHER; note = 2'-O-methyl adenosine phosphorothioate
  modified_base 18: mod_base = OTHER; note = 2'-fluoro cytosine phosphorothioate
  modified_base 19: mod_base = OTHER; note = 2'-O-methyl uridine phosphorothioate
  modified_base 20: mod_base = OTHER; note = 2'-fluoro uridine
tcaagttcgttccctaactt

SEQ ID NO: 219 - RNA, 20 nt, synthetic construct
  source 1..20: mol_type = other RNA
  modified_base 1: mod_base = OTHER; note = 5' phosphate 2'-O-methyl uridine phosphorothioate
  modified_base 2: mod_base = OTHER; note = 2'-fluoro uridine phosphorothioate
  modified_base 3: mod_base = OTHER; note = 2'-O-methyl cytosine
  modified_base 4: mod_base = OTHER; note = 2'-fluoro uridine
  modified_base 5: mod_base = OTHER; note = 2'-O-methyl cytosine
  modified_base 6: mod_base = OTHER; note = 2'-fluoro cytosine
  modified_base 7: mod_base = OTHER; note = 2'-O-methyl adenosine
  modified_base 8: mod_base = OTHER; note = 2'-fluoro guanosine
  modified_base 9: mod_base = OTHER; note = 2'-O-methyl adenosine
  modified_base 10: mod_base = OTHER; note = 2'-fluoro adenosine
  modified_base 11: mod_base = OTHER; note = 2'-O-methyl guanosine
  modified_base 12: mod_base = OTHER; note = 2'-fluoro adenosine
  modified_base 13: mod_base = OTHER; note = 2'-O-methyl guanosine phosphorothioate
  modified_base 14: mod_base = OTHER; note = 2'-fluoro adenosine phosphorothioate
  modified_base 15: mod_base = OTHER; note = 2'-O-methyl guanosine phosphorothioate
  modified_base 16: mod_base = OTHER; note = 2'-fluoro adenosine phosphorothioate
  modified_base 17: mod_base = OTHER; note = 2'-O-methyl adenosine phosphorothioate
  modified_base 18: mod_base = OTHER; note = 2'-fluoro adenosine phosphorothioate
  modified_base 19: mod_base = OTHER; note = 2'-O-methyl cytosine phosphorothioate
  modified_base 20: mod_base = OTHER; note = 2'-fluoro adenosine
ttctccagaagagagaaaca

SEQ ID NO: 220 - RNA, 20 nt, synthetic construct
  source 1..20: mol_type = other RNA
  modified_base 1: mod_base = OTHER; note = 5' phosphate 2'-O-methyl uridine phosphorothioate
  modified_base 2: mod_base = OTHER; note = 2'-fluoro cytosine phosphorothioate
  modified_base 3: mod_base = OTHER; note = 2'-O-methyl cytosine
  modified_base 4: mod_base = OTHER; note = 2'-fluoro adenosine
  modified_base 5: mod_base = OTHER; note = 2'-O-methyl guanosine
  modified_base 6: mod_base = OTHER; note = 2'-fluoro uridine
  modified_base 7: mod_base = OTHER; note = 2'-O-methyl uridine
  modified_base 8: mod_base = OTHER; note = 2'-fluoro uridine
  modified_base 9: mod_base = OTHER; note = 2'-O-methyl cytosine
  modified_base 10: mod_base = OTHER; note = 2'-fluoro uridine
  modified_base 11: mod_base = OTHER; note = 2'-O-methyl cytosine
  modified_base 12: mod_base = OTHER; note = 2'-fluoro cytosine
  modified_base 13: mod_base = OTHER; note = 2'-O-methyl adenosine phosphorothioate
  modified_base 14: mod_base = OTHER; note = 2'-fluoro guanosine phosphorothioate
  modified_base 15: mod_base = OTHER; note = 2'-O-methyl adenosine phosphorothioate
  modified_base 16: mod_base = OTHER; note = 2'-fluoro adenosine phosphorothioate
  modified_base 17: mod_base = OTHER; note = 2'-O-methyl guanosine phosphorothioate
  modified_base 18: mod_base = OTHER; note = 2'-fluoro adenosine phosphorothioate
  modified_base 19: mod_base = OTHER; note = 2'-O-methyl guanosine phosphorothioate
  modified_base 20: mod_base = OTHER; note = 2'-fluoro adenosine
tccagtttctccagaagaga

SEQ ID NO: 221 - RNA, 20 nt, synthetic construct
  source 1..20: mol_type = other RNA
  modified_base 1: mod_base = OTHER; note = 5' phosphate 2'-O-methyl uridine phosphorothioate
  modified_base 2: mod_base = OTHER; note = 2'-fluoro cytosine phosphorothioate
  modified_base 3: mod_base = OTHER; note = 2'-O-methyl cytosine
  modified_base 4: mod_base = OTHER; note = 2'-fluoro adenosine
  modified_base 5: mod_base = OTHER; note = 2'-O-methyl adenosine
  modified_base 6: mod_base = OTHER; note = 2'-fluoro guanosine
  modified_base 7: mod_base = OTHER; note = 2'-O-methyl uridine
  modified_base 8: mod_base = OTHER; note = 2'-fluoro uridine
  modified_base 9: mod_base = OTHER; note = 2'-O-methyl cytosine
  modified_base 10: mod_base = OTHER; note = 2'-fluoro uridine
  modified_base 11: mod_base = OTHER; note = 2'-O-methyl cytosine
  modified_base 12: mod_base = OTHER; note = 2'-fluoro uridine
  modified_base 13: mod_base = OTHER; note = 2'-O-methyl uridine phosphorothioate
  modified_base 14: mod_base = OTHER; note = 2'-fluoro cytosine phosphorothioate
  modified_base 15: mod_base = OTHER; note = 2'-O-methyl adenosine phosphorothioate
  modified_base 16: mod_base = OTHER; note = 2'-fluoro cytosine phosphorothioate
  modified_base 17: mod_base = OTHER; note = 2'-O-methyl adenosine phosphorothioate
  modified_base 18: mod_base = OTHER; note = 2'-fluoro adenosine phosphorothioate
  modified_base 19: mod_base = OTHER; note = 2'-O-methyl cytosine phosphorothioate
  modified_base 20: mod_base = OTHER; note = 2'-fluoro adenosine
tccaagttctcttcacaaca

SEQ ID NO: 222 - RNA, 20 nt, synthetic construct
  source 1..20: mol_type = other RNA
  modified_base 1: mod_base = OTHER; note = 5' phosphate 2'-O-methyl uridine phosphorothioate
  modified_base 2: mod_base = OTHER; note = 2'-fluoro uridine phosphorothioate
  modified_base 3: mod_base = OTHER; note = 2'-O-methyl guanosine
  modified_base 4: mod_base = OTHER; note = 2'-fluoro adenosine
  modified_base 5: mod_base = OTHER; note = 2'-O-methyl guanosine
  modified_base 6: mod_base = OTHER; note = 2'-fluoro guanosine
  modified_base 7: mod_base = OTHER; note = 2'-O-methyl adenosine
  modified_base 8: mod_base = OTHER; note = 2'-fluoro guanosine
  modified_base 9: mod_base = OTHER; note = 2'-O-methyl guanosine
  modified_base 10: mod_base = OTHER; note = 2'-fluoro uridine
  modified_base 11: mod_base = OTHER; note = 2'-O-methyl adenosine
  modified_base 12: mod_base = OTHER; note = 2'-fluoro adenosine
  modified_base 13: mod_base = OTHER; note = 2'-O-methyl cytosine phosphorothioate
  modified_base 14: mod_base = OTHER; note = 2'-fluoro cytosine phosphorothioate
  modified_base 15: mod_base = OTHER; note = 2'-O-methyl cytosine phosphorothioate
  modified_base 16: mod_base = OTHER; note = 2'-fluoro uridine phosphorothioate
  modified_base 17: mod_base = OTHER; note = 2'-O-methyl adenosine phosphorothioate
  modified_base 18: mod_base = OTHER; note = 2'-fluoro guanosine phosphorothioate
  modified_base 19: mod_base = OTHER; note = 2'-O-methyl adenosine phosphorothioate
  modified_base 20: mod_base = OTHER; note = 2'-fluoro guanosine
ttgaggaggtaaccctagag

SEQ ID NO: 223 - RNA, 20 nt, synthetic construct
  source 1..20: mol_type = other RNA
  modified_base 1: mod_base = OTHER; note = 5' phosphate 2'-O-methyl uridine phosphorothioate
  modified_base 2: mod_base = OTHER; note = 2'-fluoro uridine phosphorothioate
  modified_base 3: mod_base = OTHER; note = 2'-O-methyl adenosine
  modified_base 4: mod_base = OTHER; note = 2'-fluoro uridine
  modified_base 5: mod_base = OTHER; note = 2'-O-methyl guanosine
  modified_base 6: mod_base = OTHER; note = 2'-fluoro uridine
  modified_base 7: mod_base = OTHER; note = 2'-O-methyl cytosine
  modified_base 8: mod_base = OTHER; note = 2'-fluoro adenosine
  modified_base 9: mod_base = OTHER; note = 2'-O-methyl uridine
  modified_base 10: mod_base = OTHER; note = 2'-fluoro cytosine
  modified_base 11: mod_base = OTHER; note = 2'-O-methyl cytosine
  modified_base 12: mod_base = OTHER; note = 2'-fluoro adenosine
  modified_base 13: mod_base = OTHER; note = 2'-O-methyl cytosine phosphorothioate
  modified_base 14: mod_base = OTHER; note = 2'-fluoro uridine phosphorothioate
  modified_base 15: mod_base = OTHER; note = 2'-O-methyl adenosine phosphorothioate
  modified_base 16: mod_base = OTHER; note = 2'-fluoro cytosine phosphorothioate
  modified_base 17: mod_base = OTHER; note = 2'-O-methyl cytosine phosphorothioate
  modified_base 18: mod_base = OTHER; note = 2'-fluoro cytosine phosphorothioate
  modified_base 19: mod_base = OTHER; note = 2'-O-methyl guanosine phosphorothioate
  modified_base 20: mod_base = OTHER; note = 2'-fluoro cytosine
ttatgtcatccactacccgc

SEQ ID NO: 224 - RNA, 20 nt, synthetic construct
  source 1..20: mol_type = other RNA
  modified_base 1: mod_base = OTHER; note = 5' phosphate 2'-O-methyl uridine phosphorothioate
  modified_base 2: mod_base = OTHER; note = 2'-fluoro uridine phosphorothioate
  modified_base 3: mod_base = OTHER; note = 2'-O-methyl uridine
  modified_base 4: mod_base = OTHER; note = 2'-fluoro adenosine
  modified_base 5: mod_base = OTHER; note = 2'-O-methyl uridine
  modified_base 6: mod_base = OTHER; note = 2'-fluoro guanosine
  modified_base 7: mod_base = OTHER; note = 2'-O-methyl uridine
  modified_base 8: mod_base = OTHER; note = 2'-fluoro cytosine
  modified_base 9: mod_base = OTHER; note = 2'-O-methyl adenosine
  modified_base 10: mod_base = OTHER; note = 2'-fluoro uridine
  modified_base 11: mod_base = OTHER; note = 2'-O-methyl cytosine
  modified_base 12: mod_base = OTHER; note = 2'-fluoro cytosine
  modified_base 13: mod_base = OTHER; note = 2'-O-methyl adenosine phosphorothioate
  modified_base 14: mod_base = OTHER; note = 2'-fluoro cytosine phosphorothioate
  modified_base 15: mod_base = OTHER; note = 2'-O-methyl uridine phosphorothioate
  modified_base 16: mod_base = OTHER; note = 2'-fluoro adenosine phosphorothioate
  modified_base 17: mod_base = OTHER; note = 2'-O-methyl cytosine phosphorothioate
  modified_base 18: mod_base = OTHER; note = 2'-fluoro cytosine phosphorothioate
  modified_base 19: mod_base = OTHER; note = 2'-O-methyl cytosine phosphorothioate
  modified_base 20: mod_base = OTHER; note = 2'-fluoro guanosine
tttatgtcatccactacccg

SEQ ID NO: 225 - RNA, 20 nt, synthetic construct
  source 1..20: mol_type = other RNA
  modified_base 1: mod_base = OTHER; note = 5' phosphate 2'-O-methyl uridine phosphorothioate
  modified_base 2: mod_base = OTHER; note = 2'-fluoro uridine phosphorothioate
  modified_base 3: mod_base = OTHER; note = 2'-O-methyl adenosine
  modified_base 4: mod_base = OTHER; note = 2'-fluoro adenosine
  modified_base 5: mod_base = OTHER; note = 2'-O-methyl adenosine
  modified_base 6: mod_base = OTHER; note = 2'-fluoro adenosine
  modified_base 7: mod_base = OTHER; note = 2'-O-methyl guanosine
  modified_base 8: mod_base = OTHER; note = 2'-fluoro cytosine
  modified_base 9: mod_base = OTHER; note = 2'-O-methyl adenosine
  modified_base 10: mod_base = OTHER; note = 2'-fluoro uridine
  modified_base 11: mod_base = OTHER; note = 2'-O-methyl uridine
  modified_base 12: mod_base = OTHER; note = 2'-fluoro adenosine
  modified_base 13: mod_base = OTHER; note = 2'-O-methyl uridine phosphorothioate
  modified_base 14: mod_base = OTHER; note = 2'-fluoro guanosine phosphorothioate
  modified_base 15: mod_base = OTHER; note = 2'-O-methyl uridine phosphorothioate
  modified_base 16: mod_base = OTHER; note = 2'-fluoro cytosine phosphorothioate
  modified_base 17: mod_base = OTHER; note = 2'-O-methyl adenosine phosphorothioate
  modified_base 18: mod_base = OTHER; note = 2'-fluoro uridine phosphorothioate
  modified_base 19: mod_base = OTHER; note = 2'-O-methyl cytosine phosphorothioate
  modified_base 20: mod_base = OTHER; note = 2'-fluoro cytosine
ttaaaagcattatgtcatcc

SEQ ID NO: 226 - RNA, 20 nt, synthetic construct
  source 1..20: mol_type = other RNA
  modified_base 1: mod_base = OTHER; note = 5' phosphate 2'-O-methyl uridine phosphorothioate
  modified_base 2: mod_base = OTHER; note = 2'-fluoro cytosine phosphorothioate
  modified_base 3: mod_base = OTHER; note = 2'-O-methyl cytosine
  modified_base 4: mod_base = OTHER; note = 2'-fluoro adenosine
  modified_base 5: mod_base = OTHER; note = 2'-O-methyl uridine
  modified_base 6: mod_base = OTHER; note = 2'-fluoro uridine
  modified_base 7: mod_base = OTHER; note = 2'-O-methyl guanosine
  modified_base 8: mod_base = OTHER; note = 2'-fluoro guanosine
  modified_base 9: mod_base = OTHER; note = 2'-O-methyl adenosine
  modified_base 10: mod_base = OTHER; note = 2'-fluoro uridine
  modified_base 11: mod_base = OTHER; note = 2'-O-methyl guanosine
  modified_base 12: mod_base = OTHER; note = 2'-fluoro cytosine
  modified_base 13: mod_base = OTHER; note = 2'-O-methyl guanosine phosphorothioate
  modified_base 14: mod_base = OTHER; note = 2'-fluoro uridine phosphorothioate
  modified_base 15: mod_base = OTHER; note = 2'-O-methyl uridine phosphorothioate
  modified_base 16: mod_base = OTHER; note = 2'-fluoro cytosine phosphorothioate
  modified_base 17: mod_base = OTHER; note = 2'-O-methyl adenosine phosphorothioate
  modified_base 18: mod_base = OTHER; note = 2'-fluoro cytosine phosphorothioate
  modified_base 19: mod_base = OTHER; note = 2'-O-methyl adenosine phosphorothioate
  modified_base 20: mod_base = OTHER; note = 2'-fluoro cytosine
tccattggatgcgttcacac

SEQ ID NO: 227 - RNA, 20 nt, synthetic construct
  source 1..20: mol_type = other RNA
  modified_base 1: mod_base = OTHER; note = 5' phosphate 2'-O-methyl uridine phosphorothioate
  modified_base 2: mod_base = OTHER; note = 2'-fluoro uridine phosphorothioate
  modified_base 3: mod_base = OTHER; note = 2'-O-methyl cytosine
  modified_base 4: mod_base = OTHER; note = 2'-fluoro adenosine
  modified_base 5: mod_base = OTHER; note = 2'-O-methyl cytosine
  modified_base 6: mod_base = OTHER; note = 2'-fluoro adenosine
  modified_base 7: mod_base = OTHER; note = 2'-O-methyl guanosine
  modified_base 8: mod_base = OTHER; note = 2'-fluoro guanosine
  modified_base 9: mod_base = OTHER; note = 2'-O-methyl cytosine
  modified_base 10: mod_base = OTHER; note = 2'-fluoro uridine
  modified_base 11: mod_base = OTHER; note = 2'-O-methyl guanosine
  modified_base 12: mod_base = OTHER; note = 2'-fluoro cytosine
  modified_base 13: mod_base = OTHER; note = 2'-O-methyl uridine phosphorothioate
  modified_base 14: mod_base = OTHER; note = 2'-fluoro uridine phosphorothioate
  modified_base 15: mod_base = OTHER; note = 2'-O-methyl cytosine phosphorothioate
  modified_base 16: mod_base = OTHER; note = 2'-fluoro adenosine phosphorothioate
  modified_base 17: mod_base = OTHER; note = 2'-O-methyl adenosine phosphorothioate
  modified_base 18: mod_base = OTHER; note = 2'-fluoro guanosine phosphorothioate
  modified_base 19: mod_base = OTHER; note = 2'-O-methyl uridine phosphorothioate
  modified_base 20: mod_base = OTHER; note = 2'-fluoro guanosine
ttcacaggctgcttcaagtg

SEQ ID NO: 228 - RNA, 20 nt, synthetic construct
  source 1..20: mol_type = other RNA
  modified_base 1: mod_base = OTHER; note = 5' phosphate 2'-O-methyl uridine phosphorothioate
  modified_base 2: mod_base = OTHER; note = 2'-fluoro cytosine phosphorothioate
  modified_base 3: mod_base = OTHER; note = 2'-O-methyl uridine
  modified_base 4: mod_base = OTHER; note = 2'-fluoro adenosine
  modified_base 5: mod_base = OTHER; note = 2'-O-methyl adenosine
  modified_base 6: mod_base = OTHER; note = 2'-fluoro adenosine
  modified_base 7: mod_base = OTHER; note = 2'-O-methyl uridine
  modified_base 8: mod_base = OTHER; note = 2'-fluoro guanosine
  modified_base 9: mod_base = OTHER; note = 2'-O-methyl adenosine
  modified_base 10: mod_base = OTHER; note = 2'-fluoro adenosine
  modified_base 11: mod_base = OTHER; note = 2'-O-methyl adenosine
  modified_base 12: mod_base = OTHER; note = 2'-fluoro cytosine
  modified_base 13: mod_base = OTHER; note = 2'-O-methyl guanosine phosphorothioate
  modified_base 14: mod_base = OTHER; note = 2'-fluoro cytosine phosphorothioate
  modified_base 15: mod_base = OTHER; note = 2'-O-methyl cytosine phosphorothioate
  modified_base 16: mod_base = OTHER; note = 2'-fluoro adenosine phosphorothioate
  modified_base 17: mod_base = OTHER; note = 2'-O-methyl guanosine phosphorothioate
  modified_base 18: mod_base = OTHER; note = 2'-fluoro guanosine phosphorothioate
  modified_base 19: mod_base = OTHER; note = 2'-O-methyl adenosine phosphorothioate
  modified_base 20: mod_base = OTHER; note = 2'-fluoro guanosine
tctaaatgaaacgccaggag

SEQ ID NO: 229 - RNA, 20 nt, synthetic construct
  source 1..20: mol_type = other RNA
  modified_base 1: mod_base = OTHER; note = 5' phosphate 2'-O-methyl uridine phosphorothioate
  modified_base 2: mod_base = OTHER; note = 2'-fluoro adenosine phosphorothioate
  modified_base 3: mod_base = OTHER; note = 2'-O-methyl cytosine
  modified_base 4: mod_base = OTHER; note = 2'-fluoro adenosine
  modified_base 5: mod_base = OTHER; note = 2'-O-methyl adenosine
  modified_base 6: mod_base = OTHER; note = 2'-fluoro adenosine
  modified_base 7: mod_base = OTHER; note = 2'-O-methyl cytosine
  modified_base 8: mod_base = OTHER; note = 2'-fluoro uridine
  modified_base 9: mod_base = OTHER; note = 2'-O-methyl adenosine
  modified_base 10: mod_base = OTHER; note = 2'-fluoro adenosine
  modified_base 11: mod_base = OTHER; note = 2'-O-methyl adenosine
  modified_base 12: mod_base = OTHER; note = 2'-fluoro uridine
  modified_base 13: mod_base = OTHER; note = 2'-O-methyl guanosine phosphorothioate
  modified_base 14: mod_base = OTHER; note = 2'-fluoro adenosine phosphorothioate
  modified_base 15: mod_base = OTHER; note = 2'-O-methyl adenosine phosphorothioate
  modified_base 16: mod_base = OTHER; note = 2'-fluoro adenosine phosphorothioate
  modified_base 17: mod_base = OTHER; note = 2'-O-methyl cytosine phosphorothioate
  modified_base 18: mod_base = OTHER; note = 2'-fluoro guanosine phosphorothioate
  modified_base 19: mod_base = OTHER; note = 2'-O-methyl cytosine phosphorothioate
  modified_base 20: mod_base = OTHER; note = 2'-fluoro cytosine
tacaaactaaatgaaacgcc

SEQ ID NO: 230 - RNA, 20 nt, synthetic construct
  source 1..20: mol_type = other RNA
  modified_base 1: mod_base = OTHER; note = 5' phosphate 2'-O-methyl uridine phosphorothioate
  modified_base 2: mod_base = OTHER; note = 2'-fluoro cytosine phosphorothioate
  modified_base 3: mod_base = OTHER; note = 2'-O-methyl uridine
  modified_base 4: mod_base = OTHER; note = 2'-fluoro adenosine
  modified_base 5: mod_base = OTHER; note = 2'-O-methyl cytosine
  modified_base 6: mod_base = OTHER; note = 2'-fluoro adenosine
  modified_base 7: mod_base = OTHER; note = 2'-O-methyl cytosine
  modified_base 8: mod_base = OTHER; note = 2'-fluoro uridine
  modified_base 9: mod_base = OTHER; note = 2'-O-methyl adenosine
  modified_base 10: mod_base = OTHER; note = 2'-fluoro cytosine
  modified_base 11: mod_base = OTHER; note = 2'-O-methyl adenosine
  modified_base 12: mod_base = OTHER; note = 2'-fluoro cytosine
  modified_base 13: mod_base = OTHER; note = 2'-O-methyl cytosine phosphorothioate
  modified_base 14: mod_base = OTHER; note = 2'-fluoro adenosine phosphorothioate
  modified_base 15: mod_base = OTHER; note = 2'-O-methyl cytosine phosphorothioate
  modified_base 16: mod_base = OTHER; note = 2'-fluoro adenosine phosphorothioate
  modified_base 17: mod_base = OTHER; note = 2'-O-methyl adenosine phosphorothioate
  modified_base 18: mod_base = OTHER; note = 2'-fluoro adenosine phosphorothioate
  modified_base 19: mod_base = OTHER; note = 2'-O-methyl cytosine phosphorothioate
  modified_base 20: mod_base = OTHER; note = 2'-fluoro uridine
tctacactacaccacaaact

SEQ ID NO: 231 - RNA, 20 nt, synthetic construct
  source 1..20: mol_type = other RNA
  modified_base 1: mod_base = OTHER; note = 5' phosphate 2'-O-methyl uridine phosphorothioate
  modified_base 2: mod_base = OTHER; note = 2'-fluoro uridine phosphorothioate
  modified_base 3: mod_base = OTHER; note = 2'-O-methyl adenosine
  modified_base 4: mod_base = OTHER; note = 2'-fluoro adenosine
  modified_base 5: mod_base = OTHER; note = 2'-O-methyl cytosine
  modified_base 6: mod_base = OTHER; note = 2'-fluoro uridine
  modified_base 7: mod_base = OTHER; note = 2'-O-methyl adenosine
  modified_base 8: mod_base = OTHER; note = 2'-fluoro cytosine
  modified_base 9: mod_base = OTHER; note = 2'-O-methyl adenosine
  modified_base 10: mod_base = OTHER; note = 2'-fluoro cytosine
  modified_base 11: mod_base = OTHER; note = 2'-O-methyl uridine
  modified_base 12: mod_base = OTHER; note = 2'-fluoro adenosine
  modified_base 13: mod_base = OTHER; note = 2'-O-methyl cytosine phosphorothioate
  modified_base 14: mod_base = OTHER; note = 2'-fluoro adenosine phosphorothioate
  modified_base 15: mod_base = OTHER; note = 2'-O-methyl cytosine phosphorothioate
  modified_base 16: mod_base = OTHER; note = 2'-fluoro cytosine phosphorothioate
  modified_base 17: mod_base = OTHER; note = 2'-O-methyl adenosine phosphorothioate
  modified_base 18: mod_base = OTHER; note = 2'-fluoro cytosine phosphorothioate
  modified_base 19: mod_base = OTHER; note = 2'-O-methyl adenosine phosphorothioate
  modified_base 20: mod_base = OTHER; note = 2'-fluoro adenosine
ttaactacactacaccacaa

SEQ ID NO: 232 - RNA, 20 nt, synthetic construct
  source 1..20: mol_type = other RNA
  modified_base 1: mod_base = OTHER; note = 5' phosphate 2'-O-methyl uridine phosphorothioate
  modified_base 2: mod_base = OTHER; note = 2'-fluoro uridine phosphorothioate
  modified_base 3: mod_base = OTHER; note = 2'-O-methyl uridine
  modified_base 4: mod_base = OTHER; note = 2'-fluoro adenosine
  modified_base 5: mod_base = OTHER; note = 2'-O-methyl adenosine
  modified_base 6: mod_base = OTHER; note = 2'-fluoro cytosine
  modified_base 7: mod_base = OTHER; note = 2'-O-methyl uridine
  modified_base 8: mod_base = OTHER; note = 2'-fluoro adenosine
  modified_base 9: mod_base = OTHER; note = 2'-O-methyl cytosine
  modified_base 10: mod_base = OTHER; note = 2'-fluoro adenosine
  modified_base 11: mod_base = OTHER; note = 2'-O-methyl cytosine
  modified_base 12: mod_base = OTHER; note = 2'-fluoro uridine
  modified_base 13: mod_base = OTHER; note = 2'-O-methyl adenosine phosphorothioate
  modified_base 14: mod_base = OTHER; note = 2'-fluoro cytosine phosphorothioate
  modified_base 15: mod_base = OTHER; note = 2'-O-methyl adenosine phosphorothioate
  modified_base 16: mod_base = OTHER; note = 2'-fluoro cytosine phosphorothioate
  modified_base 17: mod_base = OTHER; note = 2'-O-methyl cytosine phosphorothioate
  modified_base 18: mod_base = OTHER; note = 2'-fluoro adenosine phosphorothioate
  modified_base 19: mod_base = OTHER; note = 2'-O-methyl cytosine phosphorothioate
  modified_base 20: mod_base = OTHER; note = 2'-fluoro adenosine
tttaactacactacaccaca

SEQ ID NO: 233 - RNA, 20 nt, synthetic construct
  source 1..20: mol_type = other RNA
  modified_base 1: mod_base = OTHER; note = 5' phosphate 2'-O-methyl uridine phosphorothioate
  modified_base 2: mod_base = OTHER; note = 2'-fluoro uridine phosphorothioate
  modified_base 3: mod_base = OTHER; note = 2'-O-methyl uridine
  modified_base 4: mod_base = OTHER; note = 2'-fluoro uridine
  modified_base 5: mod_base = OTHER; note = 2'-O-methyl adenosine
  modified_base 6: mod_base = OTHER; note = 2'-fluoro adenosine
  modified_base 7: mod_base = OTHER; note = 2'-O-methyl cytosine
  modified_base 8: mod_base = OTHER; note = 2'-fluoro uridine
  modified_base 9: mod_base = OTHER; note = 2'-O-methyl adenosine
  modified_base 10: mod_base = OTHER; note = 2'-fluoro cytosine
  modified_base 11: mod_base = OTHER; note = 2'-O-methyl adenosine
  modified_base 12: mod_base = OTHER; note = 2'-fluoro cytosine
  modified_base 13: mod_base = OTHER; note = 2'-O-methyl uridine phosphorothioate
  modified_base 14: mod_base = OTHER; note = 2'-fluoro adenosine phosphorothioate
  modified_base 15: mod_base = OTHER; note = 2'-O-methyl cytosine phosphorothioate
  modified_base 16: mod_base = OTHER; note = 2'-fluoro adenosine phosphorothioate
  modified_base 17: mod_base = OTHER; note = 2'-O-methyl cytosine phosphorothioate
  modified_base 18: mod_base = OTHER; note = 2'-fluoro cytosine phosphorothioate
  modified_base 19: mod_base = OTHER; note = 2'-O-methyl adenosine phosphorothioate
  modified_base 20: mod_base = OTHER; note = 2'-fluoro cytosine
ttttaactacactacaccac

SEQ ID NO: 234 - RNA, 20 nt, synthetic construct
  source 1..20: mol_type = other RNA
  modified_base 1: mod_base = OTHER; note = 5' phosphate 2'-O-methyl uridine phosphorothioate
  modified_base 2: mod_base = OTHER; note = 2'-fluoro adenosine phosphorothioate
  modified_base 3: mod_base = OTHER; note = 2'-O-methyl adenosine
  modified_base 4: mod_base = OTHER; note = 2'-fluoro cytosine
  modified_base 5: mod_base = OTHER; note = 2'-O-methyl cytosine
  modified_base 6: mod_base = OTHER; note = 2'-fluoro uridine
  modified_base 7: mod_base = OTHER; note = 2'-O-methyl guanosine
  modified_base 8: mod_base = OTHER; note = 2'-fluoro guanosine
  modified_base 9: mod_base = OTHER; note = 2'-O-methyl uridine
  modified_base 10: mod_base = OTHER; note = 2'-fluoro uridine
  modified_base 11: mod_base = OTHER; note = 2'-O-methyl uridine
  modified_base 12: mod_base = OTHER; note = 2'-fluoro adenosine
  modified_base 13: mod_base = OTHER; note = 2'-O-methyl adenosine phosphorothioate
  modified_base 14: mod_base = OTHER; note = 2'-fluoro cytosine phosphorothioate
  modified_base 15: mod_base = OTHER; note = 2'-O-methyl uridine phosphorothioate
  modified_base 16: mod_base = OTHER; note = 2'-fluoro adenosine phosphorothioate
  modified_base 17: mod_base = OTHER; note = 2'-O-methyl cytosine phosphorothioate
  modified_base 18: mod_base = OTHER; note = 2'-fluoro adenosine phosphorothioate
  modified_base 19: mod_base = OTHER; note = 2'-O-methyl cytosine phosphorothioate
  modified_base 20: mod_base = OTHER; note = 2'-fluoro uridine
taacctggtttaactacact

SEQ ID NO: 235 - RNA, 20 nt, synthetic construct
  source 1..20: mol_type = other RNA
  modified_base 1: mod_base = OTHER; note = 5' phosphate 2'-O-methyl uridine phosphorothioate
  modified_base 2: mod_base = OTHER; note = 2'-fluoro uridine phosphorothioate
  modified_base 3: mod_base = OTHER; note = 2'-O-methyl adenosine
  modified_base 4: mod_base = OTHER; note = 2'-fluoro adenosine
  modified_base 5: mod_base = OTHER; note = 2'-O-methyl adenosine
  modified_base 6: mod_base = OTHER; note = 2'-fluoro adenosine
  modified_base 7: mod_base = OTHER; note = 2'-O-methyl cytosine
  modified_base 8: mod_base = OTHER; note = 2'-fluoro cytosine
  modified_base 9: mod_base = OTHER; note = 2'-O-methyl uridine
  modified_base 10: mod_base = OTHER; note = 2'-fluoro guanosine
  modified_base 11: mod_base = OTHER; note = 2'-O-methyl guanosine
  modified_base 12: mod_base = OTHER; note = 2'-fluoro uridine
  modified_base 13: mod_base = OTHER; note = 2'-O-methyl uridine phosphorothioate
  modified_base 14: mod_base = OTHER; note = 2'-fluoro uridine phosphorothioate
  modified_base 15: mod_base = OTHER; note = 2'-O-methyl adenosine phosphorothioate
  modified_base 16: mod_base = OTHER; note = 2'-fluoro adenosine phosphorothioate
  modified_base 17: mod_base = OTHER; note = 2'-O-methyl cytosine phosphorothioate
  modified_base 18: mod_base = OTHER; note = 2'-fluoro uridine phosphorothioate
  modified_base 19: mod_base = OTHER; note = 2'-O-methyl adenosine phosphorothioate
  modified_base 20: mod_base = OTHER; note = 2'-fluoro cytosine
ttaaaacctggtttaactac

SEQ ID NO: 236 - RNA, 20 nt, synthetic construct
  source 1..20: mol_type = other RNA
  modified_base 1: mod_base = OTHER; note = 5' phosphate 2'-O-methyl uridine phosphorothioate
  modified_base 2: mod_base = OTHER; note = 2'-fluoro uridine phosphorothioate
  modified_base 3: mod_base = OTHER; note = 2'-O-methyl uridine
  modified_base 4: mod_base = OTHER; note = 2'-fluoro adenosine
  modified_base 5: mod_base = OTHER; note = 2'-O-methyl adenosine
  modified_base 6: mod_base = OTHER; note = 2'-fluoro adenosine
  modified_base 7: mod_base = OTHER; note = 2'-O-methyl adenosine
  modified_base 8: mod_base = OTHER; note = 2'-fluoro cytosine
  modified_base 9: mod_base = OTHER; note = 2'-O-methyl cytosine
  modified_base 10: mod_base = OTHER; note = 2'-fluoro uridine
  modified_base 11: mod_base = OTHER; note = 2'-O-methyl guanosine
  modified_base 12: mod_base = OTHER; note = 2'-fluoro guanosine
  modified_base 13: mod_base = OTHER; note = 2'-O-methyl uridine phosphorothioate
  modified_base 14: mod_base = OTHER; note = 2'-fluoro uridine phosphorothioate
  modified_base 15: mod_base = OTHER; note = 2'-O-methyl uridine phosphorothioate
  modified_base 16: mod_base = OTHER; note = 2'-fluoro adenosine phosphorothioate
  modified_base 17: mod_base = OTHER; note = 2'-O-methyl adenosine phosphorothioate
  modified_base 18: mod_base = OTHER; note = 2'-fluoro cytosine phosphorothioate
  modified_base 19: mod_base = OTHER; note = 2'-O-methyl uridine phosphorothioate
  modified_base 20: mod_base = OTHER; note = 2'-fluoro adenosine
tttaaaacctggtttaacta

SEQ ID NO: 237 - RNA, 20 nt, synthetic construct
  source 1..20: mol_type = other RNA
  modified_base 1: mod_base = OTHER; note = 5' phosphate 2'-O-methyl uridine phosphorothioate
  modified_base 2: mod_base = OTHER; note = 2'-fluoro cytosine phosphorothioate
  modified_base 3: mod_base = OTHER; note = 2'-O-methyl adenosine
  modified_base 4: mod_base = OTHER; note = 2'-fluoro cytosine
  modified_base 5: mod_base = OTHER; note = 2'-O-methyl cytosine
  modified_base 6: mod_base = OTHER; note = 2'-fluoro uridine
  modified_base 7: mod_base = OTHER; note = 2'-O-methyl cytosine
  modified_base 8: mod_base = OTHER; note = 2'-fluoro uridine
  modified_base 9: mod_base = OTHER; note = 2'-O-methyl cytosine
  modified_base 10: mod_base = OTHER; note = 2'-fluoro uridine
  modified_base 11: mod_base = OTHER; note = 2'-O-methyl guanosine
  modified_base 12: mod_base = OTHER; note = 2'-fluoro guanosine
  modified_base 13: mod_base = OTHER; note = 2'-O-methyl cytosine phosphorothioate
  modified_base 14: mod_base = OTHER; note = 2'-fluoro uridine phosphorothioate
  modified_base 15: mod_base = OTHER; note = 2'-O-methyl adenosine phosphorothioate
  modified_base 16: mod_base = OTHER; note = 2'-fluoro uridine phosphorothioate
  modified_base 17: mod_base = OTHER; note = 2'-O-methyl guanosine phosphorothioate
  modified_base 18: mod_base = OTHER; note = 2'-fluoro cytosine phosphorothioate
  modified_base 19: mod_base = OTHER; note = 2'-O-methyl uridine phosphorothioate
  modified_base 20: mod_base = OTHER; note = 2'-fluoro uridine
tcacctctctggctatgctt

SEQ ID NO: 238 - RNA, 20 nt, synthetic construct
  source 1..20: mol_type = other RNA
  modified_base 1: mod_base = OTHER; note = 5' phosphate 2'-O-methyl uridine phosphorothioate
  modified_base 2: mod_base = OTHER; note = 2'-fluoro cytosine phosphorothioate
  modified_base 3: mod_base = OTHER; note = 2'-O-methyl uridine
  modified_base 4: mod_base = OTHER; note = 2'-fluoro cytosine
  modified_base 5: mod_base = OTHER; note = 2'-O-methyl adenosine
  modified_base 6: mod_base = OTHER; note = 2'-fluoro uridine
  modified_base 7: mod_base = OTHER; note = 2'-O-methyl cytosine
  modified_base 8: mod_base = OTHER; note = 2'-fluoro cytosine
  modified_base 9: mod_base = OTHER; note = 2'-O-methyl adenosine
  modified_base 10: mod_base = OTHER; note = 2'-fluoro adenosine
  modified_base 11: mod_base = OTHER; note = 2'-O-methyl cytosine
  modified_base 12: mod_base = OTHER; note = 2'-fluoro uridine
  modified_base 13: mod_base = OTHER; note = 2'-O-methyl guanosine phosphorothioate
  modified_base 14: mod_base = OTHER; note = 2'-fluoro cytosine phosphorothioate
  modified_base 15: mod_base = OTHER; note = 2'-O-methyl cytosine phosphorothioate
  modified_base 16: mod_base = OTHER; note = 2'-fluoro uridine phosphorothioate
  modified_base 17: mod_base = OTHER; note = 2'-O-methyl guanosine phosphorothioate
  modified_base 18: mod_base = OTHER; note = 2'-fluoro cytosine phosphorothioate
  modified_base 19: mod_base = OTHER; note = 2'-O-methyl adenosine phosphorothioate
  modified_base 20: mod_base = OTHER; note = 2'-fluoro guanosine
tctcatccaactgcctgcag

SEQ ID NO: 239 - RNA, 20 nt, synthetic construct
  source 1..20: mol_type = other RNA
  modified_base 1: mod_base = OTHER; note = 5' phosphate 2'-O-methyl uridine phosphorothioate
  modified_base 2: mod_base = OTHER; note = 2'-fluoro guanosine phosphorothioate
  modified_base 3: mod_base = OTHER; note = 2'-O-methyl uridine
  modified_base 4: mod_base = OTHER; note = 2'-fluoro adenosine
  modified_base 5: mod_base = OTHER; note = 2'-O-methyl cytosine
  modified_base 6: mod_base = OTHER; note = 2'-fluoro uridine
  modified_base 7: mod_base = OTHER; note = 2'-O-methyl uridine
  modified_base 8: mod_base = OTHER; note = 2'-fluoro guanosine
  modified_base 9: mod_base = OTHER; note = 2'-O-methyl adenosine
  modified_base 10: mod_base = OTHER; note = 2'-fluoro cytosine
  modified_base 11: mod_base = OTHER; note = 2'-O-methyl adenosine
  modified_base 12: mod_base = OTHER; note = 2'-fluoro adenosine
  modified_base 13: mod_base = OTHER; note = 2'-O-methyl adenosine phosphorothioate
  modified_base 14: mod_base = OTHER; note = 2'-fluoro uridine phosphorothioate
  modified_base 15: mod_base = OTHER; note = 2'-O-methyl adenosine phosphorothioate
  modified_base 16: mod_base = OTHER; note = 2'-fluoro cytosine phosphorothioate
  modified_base 17: mod_base = OTHER; note = 2'-O-methyl adenosine phosphorothioate
  modified_base 18: mod_base = OTHER; note = 2'-fluoro adenosine phosphorothioate
  modified_base 19: mod_base = OTHER; note = 2'-O-methyl cytosine phosphorothioate
  modified_base 20: mod_base = OTHER; note = 2'-fluoro uridine
tgtacttgacaaatacaact

SEQ ID NO: 240 - RNA, 15 nt, synthetic construct
  source 1..15: mol_type = other RNA
  modified_base 1: mod_base = OTHER; note = 2'-fluoro uridine phosphorothioate
  modified_base 2: mod_base = OTHER; note = 2'-O-methyl guanosine phosphorothioate
  modified_base 3: mod_base = OTHER; note = 2'-fluoro cytosine
  modified_base 4: mod_base = OTHER; note = 2'-O-methyl guanosine
  modified_base 5: mod_base = OTHER; note = 2'-fluoro adenosine
  modified_base 6: mod_base = OTHER; note = 2'-O-methyl adenosine
  modified_base 7: mod_base = OTHER; note = 2'-fluoro guanosine
  modified_base 8: mod_base = OTHER; note = 2'-O-methyl uridine
  modified_base 9: mod_base = OTHER; note = 2'-fluoro uridine
  modified_base 10: mod_base = OTHER; note = 2'-O-methyl adenosine
  modified_base 11: mod_base = OTHER; note = 2'-fluoro guanosine
  modified_base 12: mod_base = OTHER; note = 2'-O-methyl guanosine
  modified_base 13: mod_base = OTHER; note = 2'-fluoro guanosine phosphorothioate
  modified_base 14: mod_base = OTHER; note = 2'-O-methyl adenosine phosphorothioate
  modified_base 15: mod_base = OTHER; note = 2'-fluoro adenosine triethylene glycol
tgcgaagttagggaa

SEQ ID NO: 241 - RNA, 15 nt, synthetic construct
  source 1..15: mol_type = other RNA
  modified_base 1: mod_base = OTHER; note = 2'-fluoro uridine phosphorothioate
  modified_base 2: mod_base = OTHER; note = 2'-O-methyl adenosine phosphorothioate
  modified_base 3: mod_base = OTHER; note = 2'-fluoro guanosine
  modified_base 4: mod_base = OTHER; note = 2'-O-methyl guanosine
  modified_base 5: mod_base = OTHER; note = 2'-fluoro guanosine
  modified_base 6: mod_base = OTHER; note = 2'-O-methyl adenosine
  modified_base 7: mod_base = OTHER; note = 2'-fluoro adenosine
  modified_base 8: mod_base = OTHER; note = 2'-O-methyl cytosine
  modified_base 9: mod_base = OTHER; note = 2'-fluoro guanosine
  modified_base 10: mod_base = OTHER; note = 2'-O-methyl adenosine
  modified_base 11: mod_base = OTHER; note = 2'-fluoro adenosine
  modified_base 12: mod_base = OTHER; note = 2'-O-methyl cytosine
  modified_base 13: mod_base = OTHER; note = 2'-fluoro uridine phosphorothioate
  modified_base 14: mod_base = OTHER; note = 2'-O-methyl uridine phosphorothioate
  modified_base 15: mod_base = OTHER; note = 2'-fluoro adenosine triethylene glycol
tagggaacgaactta

SEQ ID NO: 242 - RNA, 15 nt, synthetic construct
  source 1..15: mol_type = other RNA
  modified_base 1: mod_base = OTHER; note = 2'-fluoro adenosine phosphorothioate
  modified_base 2: mod_base = OTHER; note = 2'-O-methyl guanosine phosphorothioate
  modified_base 3: mod_base = OTHER; note = 2'-fluoro guanosine
  modified_base 4: mod_base = OTHER; note = 2'-O-methyl guanosine
  modified_base 5: mod_base = OTHER; note = 2'-fluoro adenosine
  modified_base 6: mod_base = OTHER; note = 2'-O-methyl adenosine
  modified_base 7: mod_base = OTHER; note = 2'-fluoro cytosine
  modified_base 8: mod_base = OTHER; note = 2'-O-methyl guanosine
  modified_base 9: mod_base = OTHER; note = 2'-fluoro adenosine
  modified_base 10: mod_base = OTHER; note = 2'-O-methyl adenosine
  modified_base 11: mod_base = OTHER; note = 2'-fluoro cytosine
  modified_base 12: mod_base = OTHER; note = 2'-O-methyl uridine
  modified_base 13: mod_base = OTHER; note = 2'-fluoro uridine phosphorothioate
  modified_base 14: mod_base = OTHER; note = 2'-O-methyl guanosine phosphorothioate
  modified_base 15: mod_base = OTHER; note = 2'-fluoro adenosine triethylene glycol
agggaacgaacttga

SEQ ID NO: 243 - RNA, 15 nt, synthetic construct
  source 1..15: mol_type = other RNA
  modified_base 1: mod_base = OTHER; note = 2'-fluoro cytosine phosphorothioate
  modified_base 2: mod_base = OTHER; note = 2'-O-methyl uridine phosphorothioate
  modified_base 3: mod_base = OTHER; note = 2'-fluoro cytosine
  modified_base 4: mod_base = OTHER; note = 2'-O-methyl uridine
  modified_base 5: mod_base = OTHER; note = 2'-fluoro cytosine
  modified_base 6: mod_base = OTHER; note = 2'-O-methyl uridine
  modified_base 7: mod_base = OTHER; note = 2'-fluoro uridine
  modified_base 8: mod_base = OTHER; note = 2'-O-methyl cytosine
  modified_base 9: mod_base = OTHER; note = 2'-fluoro uridine
  modified_base 10: mod_base = OTHER; note = 2'-O-methyl guanosine
  modified_base 11: mod_base = OTHER; note = 2'-fluoro guanosine
  modified_base 12: mod_base = OTHER; note = 2'-O-methyl adenosine
  modified_base 13: mod_base = OTHER; note = 2'-fluoro guanosine phosphorothioate
  modified_base 14: mod_base = OTHER; note = 2'-O-methyl adenosine phosphorothioate
  modified_base 15: mod_base = OTHER; note = 2'-fluoro adenosine triethylene glycol
ctctcttctggagaa

SEQ ID NO: 244 - RNA, 15 nt, synthetic construct
  source 1..15: mol_type = other RNA
  modified_base 1: mod_base = OTHER; note = 2'-fluoro uridine phosphorothioate
  modified_base 2: mod_base = OTHER; note = 2'-O-methyl cytosine phosphorothioate
  modified_base 3: mod_base = OTHER; note = 2'-fluoro uridine
  modified_base 4: mod_base = OTHER; note = 2'-O-methyl guanosine
  modified_base 5: mod_base = OTHER; note = 2'-fluoro guanosine
  modified_base 6: mod_base = OTHER; note = 2'-O-methyl adenosine
  modified_base 7: mod_base = OTHER; note = 2'-fluoro guanosine
  modified_base 8: mod_base = OTHER; note = 2'-O-methyl adenosine
  modified_base 9: mod_base = OTHER; note = 2'-fluoro adenosine
  modified_base 10: mod_base = OTHER; note = 2'-O-methyl adenosine
  modified_base 11: mod_base = OTHER; note = 2'-fluoro cytosine
  modified_base 12: mod_base = OTHER; note = 2'-O-methyl uridine
  modified_base 13: mod_base = OTHER; note = 2'-fluoro guanosine phosphorothioate
  modified_base 14: mod_base = OTHER; note = 2'-O-methyl guanosine phosphorothioate
  modified_base 15: mod_base = OTHER; note = 2'-fluoro adenosine triethylene glycol
tctggagaaactgga

SEQ ID NO: 245 - RNA, 15 nt, synthetic construct
  source 1..15: mol_type = other RNA
  modified_base 1: mod_base = OTHER; note = 2'-fluoro uridine phosphorothioate
  modified_base 2: mod_base = OTHER; note = 2'-O-methyl guanosine phosphorothioate
  modified_base 3: mod_base = OTHER; note = 2'-fluoro adenosine
  modified_base 4: mod_base = OTHER; note = 2'-O-methyl adenosine
  modified_base 5: mod_base = OTHER; note = 2'-fluoro guanosine
  modified_base 6: mod_base = OTHER; note = 2'-O-methyl adenosine
  modified_base 7: mod_base = OTHER; note = 2'-fluoro guanosine
  modified_base 8: mod_base = OTHER; note = 2'-O-methyl adenosine
  modified_base 9: mod_base = OTHER; note = 2'-fluoro adenosine
  modified_base 10: mod_base = OTHER; note = 2'-O-methyl cytosine
  modified_base 11: mod_base = OTHER; note = 2'-fluoro uridine
  modified_base 12: mod_base = OTHER; note = 2'-O-methyl uridine
  modified_base 13: mod_base = OTHER; note = 2'-fluoro guanosine phosphorothioate
  modified_base 14: mod_base = OTHER; note = 2'-O-methyl guanosine phosphorothioate
  modified_base 15: mod_base = OTHER; note = 2'-fluoro adenosine triethylene glycol
tgaagagaacttgga

SEQ ID NO: 246 - RNA, 15 nt, synthetic construct
  source 1..15: mol_type = other RNA
  modified_base 1: mod_base = OTHER; note = 2'-fluoro guanosine phosphorothioate
  modified_base 2: mod_base = OTHER; note = 2'-O-methyl guanosine phosphorothioate
  modified_base 3: mod_base = OTHER; note = 2'-fluoro guanosine
  modified_base 4: mod_base = OTHER; note = 2'-O-methyl uridine
  modified_base 5: mod_base = OTHER; note = 2'-fluoro uridine
  modified_base 6: mod_base = OTHER; note = 2'-O-methyl adenosine
  modified_base 7: mod_base = OTHER; note = 2'-fluoro cytosine
  modified_base 8: mod_base = OTHER; note = 2'-O-methyl cytosine
  modified_base 9: mod_base = OTHER; note = 2'-fluoro uridine
  modified_base 10: mod_base = OTHER; note = 2'-O-methyl cytosine
  modified_base 11: mod_base = OTHER; note = 2'-fluoro cytosine
  modified_base 12: mod_base = OTHER; note = 2'-O-methyl uridine
  modified_base 13: mod_base = OTHER; note = 2'-fluoro cytosine phosphorothioate
  modified_base 14: mod_base = OTHER; note = 2'-O-methyl adenosine phosphorothioate
  modified_base 15: mod_base = OTHER; note = 2'-fluoro adenosine triethylene glycol
gggttacctcctcaa

SEQ ID NO: 247 - RNA, 15 nt, synthetic construct
  source 1..15: mol_type = other RNA
  modified_base 1: mod_base = OTHER; note = 2'-fluoro uridine phosphorothioate
  modified_base 2: mod_base = OTHER; note = 2'-O-methyl adenosine phosphorothioate
  modified_base 3: mod_base = OTHER; note = 2'-fluoro guanosine
  modified_base 4: mod_base = OTHER; note = 2'-O-methyl uridine
  modified_base 5: mod_base = OTHER; note = 2'-fluoro guanosine
  modified_base 6: mod_base = OTHER; note = 2'-O-methyl guanosine
  modified_base 7: mod_base = OTHER; note = 2'-fluoro adenosine
  modified_base 8: mod_base = OTHER; note = 2'-O-methyl uridine
  modified_base 9: mod_base = OTHER; note = 2'-fluoro guanosine
  modified_base 10: mod_base = OTHER; note = 2'-O-methyl adenosine
  modified_base 11: mod_base = OTHER; note = 2'-fluoro cytosine
  modified_base 12: mod_base = OTHER; note = 2'-O-methyl adenosine
  modified_base 13: mod_base = OTHER; note = 2'-fluoro uridine phosphorothioate
  modified_base 14: mod_base = OTHER; note = 2'-O-methyl adenosine phosphorothioate
  modified_base 15: mod_base = OTHER; note = 2'-fluoro adenosine triethylene glycol
tagtggatgacataa

SEQ ID NO: 248 - RNA, 15 nt, synthetic construct
  source 1..15: mol_type = other RNA
  modified_base 1: mod_base = OTHER; note = 2'-fluoro adenosine phosphorothioate
  modified_base 2: mod_base = OTHER; note = 2'-O-methyl guanosine phosphorothioate
  modified_base 3: mod_base = OTHER; note = 2'-fluoro uridine
  modified_base 4: mod_base = OTHER; note = 2'-O-methyl guanosine
  modified_base 5: mod_base = OTHER; note = 2'-fluoro guanosine
  modified_base 6: mod_base = OTHER; note = 2'-O-methyl adenosine
  modified_base 7: mod_base = OTHER; note = 2'-fluoro uridine
  modified_base 8: mod_base = OTHER; note = 2'-O-methyl guanosine
  modified_base 9: mod_base = OTHER; note = 2'-fluoro adenosine
  modified_base 10: mod_base = OTHER; note = 2'-O-methyl cytosine
  modified_base 11: mod_base = OTHER; note = 2'-fluoro adenosine
  modified_base 12: mod_base = OTHER; note = 2'-O-methyl uridine
  modified_base 13: mod_base = OTHER; note = 2'-fluoro adenosine phosphorothioate
  modified_base 14: mod_base = OTHER; note = 2'-O-methyl adenosine phosphorothioate
  modified_base 15: mod_base = OTHER; note = 2'-fluoro adenosine triethylene glycol
agtggatgacataaa

SEQ ID NO: 249 - RNA, 15 nt, synthetic construct
  source 1..15: mol_type = other RNA
  modified_base 1: mod_base = OTHER; note = 2'-fluoro adenosine phosphorothioate
  modified_base 2: mod_base = OTHER; note = 2'-O-methyl cytosine phosphorothioate
  modified_base 3: mod_base = OTHER; note = 2'-fluoro adenosine
  modified_base 4: mod_base = OTHER; note = 2'-O-methyl uridine
  modified_base 5: mod_base = OTHER; note = 2'-fluoro adenosine
  modified_base 6: mod_base = OTHER; note = 2'-O-methyl adenosine
  modified_base 7: mod_base = OTHER; note = 2'-fluoro uridine
  modified_base 8: mod_base = OTHER; note = 2'-O-methyl guanosine
  modified_base 9: mod_base = OTHER; note = 2'-fluoro cytosine
  modified_base 10: mod_base = OTHER; note = 2'-O-methyl uridine
  modified_base 11: mod_base = OTHER; note = 2'-fluoro uridine
  modified_base 12: mod_base = OTHER; note = 2'-O-methyl uridine
  modified_base 13: mod_base = OTHER; note = 2'-fluoro uridine phosphorothioate
  modified_base 14: mod_base = OTHER; note = 2'-O-methyl adenosine phosphorothioate
  modified_base 15: mod_base = OTHER; note = 2'-fluoro adenosine triethylene glycol
acataatgcttttaa

SEQ ID NO: 250 - RNA, 15 nt, synthetic construct
  source 1..15: mol_type = other RNA
  modified_base 1: mod_base = OTHER; note = 2'-fluoro adenosine phosphorothioate
  modified_base 2: mod_base = OTHER; note = 2'-O-methyl adenosine phosphorothioate
  modified_base 3: mod_base = OTHER; note = 2'-fluoro cytosine
  modified_base 4: mod_base = OTHER; note = 2'-O-methyl guanosine
  modified_base 5: mod_base = OTHER; note = 2'-fluoro cytosine
  modified_base 6: mod_base = OTHER; note = 2'-O-methyl adenosine
  modified_base 7: mod_base = OTHER; note = 2'-fluoro uridine
  modified_base 8: mod_base = OTHER; note = 2'-O-methyl cytosine
  modified_base 9: mod_base = OTHER; note = 2'-fluoro cytosine
  modified_base 10: mod_base = OTHER; note = 2'-O-methyl adenosine
  modified_base 11: mod_base = OTHER; note = 2'-fluoro adenosine
  modified_base 12: mod_base = OTHER; note = 2'-O-methyl uridine
  modified_base 13: mod_base = OTHER; note = 2'-fluoro guanosine phosphorothioate
  modified_base 14: mod_base = OTHER; note = 2'-O-methyl guanosine phosphorothioate
  modified_base 15: mod_base = OTHER; note = 2'-fluoro adenosine triethylene glycol
aacgcatccaatgga

SEQ ID NO: 251 - RNA, 15 nt, synthetic construct
  source 1..15: mol_type = other RNA
  modified_base 1: mod_base = OTHER; note = 2'-fluoro guanosine phosphorothioate
  modified_base 2: mod_base = OTHER; note = 2'-O-methyl adenosine phosphorothioate
  modified_base 3: mod_base = OTHER; note = 2'-fluoro adenosine
  modified_base 4: mod_base = OTHER; note = 2'-O-methyl guanosine
  modified_base 5: mod_base = OTHER; note = 2'-fluoro cytosine
  modified_base 6: mod_base = OTHER; note = 2'-O-methyl adenosine
  modified_base 7: mod_base = OTHER; note = 2'-fluoro guanosine
  modified_base 8: mod_base = OTHER; note = 2'-O-methyl cytosine
  modified_base 9: mod_base = OTHER; note = 2'-fluoro cytosine
  modified_base 10: mod_base = OTHER; note = 2'-O-methyl uridine
  modified_base 11: mod_base = OTHER; note = 2'-fluoro guanosine
  modified_base 12: mod_base = OTHER; note = 2'-O-methyl uridine
  modified_base 13: mod_base = OTHER; note = 2'-fluoro guanosine phosphorothioate
  modified_base 14: mod_base = OTHER; note = 2'-O-methyl adenosine phosphorothioate
  modified_base 15: mod_base = OTHER; note = 2'-fluoro adenosine triethylene glycol
gaagcagcctgtgaa

SEQ ID NO: 252 - RNA, 15 nt, synthetic construct
  source 1..15: mol_type = other RNA
  modified_base 1: mod_base = OTHER; note = 2'-fluoro guanosine phosphorothioate
  modified_base 2: mod_base = OTHER; note = 2'-O-methyl guanosine phosphorothioate
  modified_base 3: mod_base = OTHER; note = 2'-fluoro cytosine
  modified_base 4: mod_base = OTHER; note = 2'-O-methyl guanosine
  modified_base 5: mod_base = OTHER; note = 2'-fluoro uridine
  modified_base 6: mod_base = OTHER; note = 2'-O-methyl uridine
  modified_base 7: mod_base = OTHER; note = 2'-fluoro uridine
  modified_base 8: mod_base = OTHER; note = 2'-O-methyl cytosine
  modified_base 9: mod_base = OTHER; note = 2'-fluoro adenosine
  modified_base 10: mod_base = OTHER; note = 2'-O-methyl uridine
  modified_base 11: mod_base = OTHER; note = 2'-fluoro uridine
  modified_base 12: mod_base = OTHER; note = 2'-O-methyl uridine
  modified_base 13: mod_base = OTHER; note = 2'-fluoro adenosine phosphorothioate
  modified_base 14: mod_base = OTHER; note = 2'-O-methyl guanosine phosphorothioate
  modified_base 15: mod_base = OTHER; note = 2'-fluoro adenosine triethylene glycol
ggcgtttcatttaga

SEQ ID NO: 253 - RNA, 15 nt, synthetic construct
  source 1..15: mol_type = other RNA
  modified_base 1: mod_base = OTHER; note = 2'-fluoro uridine phosphorothioate
  modified_base 2: mod_base = OTHER; note = 2'-O-methyl uridine phosphorothioate
  modified_base 3: mod_base = OTHER; note = 2'-fluoro cytosine
  modified_base 4: mod_base = OTHER; note = 2'-O-methyl adenosine
  modified_base 5: mod_base = OTHER; note = 2'-fluoro uridine
  modified_base 6: mod_base = OTHER; note = 2'-O-methyl uridine
  modified_base 7: mod_base = OTHER; note = 2'-fluoro uridine
  modified_base 8: mod_base = OTHER; note = 2'-O-methyl adenosine
  modified_base 9: mod_base = OTHER; note = 2'-fluoro guanosine
  modified_base 10: mod_base = OTHER; note = 2'-O-methyl uridine
  modified_base 11: mod_base = OTHER; note = 2'-fluoro uridine
  modified_base 12: mod_base = OTHER; note = 2'-O-methyl uridine
  modified_base 13: mod_base = OTHER; note = 2'-fluoro guanosine phosphorothioate
  modified_base 14: mod_base = OTHER; note = 2'-O-methyl uridine phosphorothioate
  modified_base 15: mod_base = OTHER; note = 2'-fluoro adenosine triethylene glycol
ttcatttagtttgta

SEQ ID NO: 254 - RNA, 15 nt, synthetic construct
  source 1..15: mol_type = other RNA
  modified_base 1: mod_base = OTHER; note = 2'-fluoro guanosine phosphorothioate
  modified_base 2: mod_base = OTHER; note = 2'-O-methyl uridine phosphorothioate
  modified_base 3: mod_base = OTHER; note = 2'-fluoro guanosine
  modified_base 4: mod_base = OTHER; note = 2'-O-methyl guanosine
  modified_base 5: mod_base = OTHER; note = 2'-fluoro uridine
  modified_base 6: mod_base = OTHER; note = 2'-O-methyl guanosine
  modified_base 7: mod_base = OTHER; note = 2'-fluoro uridine
  modified_base 8: mod_base = OTHER; note = 2'-O-methyl adenosine
  modified_base 9: mod_base = OTHER; note = 2'-fluoro guanosine
  modified_base 10: mod_base = OTHER; note = 2'-O-methyl uridine
  modified_base 11: mod_base = OTHER; note = 2'-fluoro guanosine
  modified_base 12: mod_base = OTHER; note = 2'-O-methyl uridine
  modified_base 13: mod_base = OTHER; note = 2'-fluoro adenosine phosphorothioate
  modified_base 14: mod_base = OTHER; note = 2'-O-methyl guanosine phosphorothioate
  modified_base 15: mod_base = OTHER; note = 2'-fluoro adenosine triethylene glycol
gtggtgtagtgtaga

SEQ ID NO: 255 - RNA, 15 nt, synthetic construct
  source 1..15: mol_type = other RNA
  modified_base 1: mod_base = OTHER; note = 2'-fluoro guanosine phosphorothioate
  modified_base 2: mod_base = OTHER; note = 2'-O-methyl uridine phosphorothioate
  modified_base 3: mod_base = OTHER; note = 2'-fluoro guanosine
  modified_base 4: mod_base = OTHER; note = 2'-O-methyl uridine
  modified_base 5: mod_base = OTHER; note = 2'-fluoro adenosine
  modified_base 6: mod_base = OTHER; note = 2'-O-methyl guanosine
  modified_base 7: mod_base = OTHER; note = 2'-fluoro uridine
  modified_base 8: mod_base = OTHER; note = 2'-O-methyl guanosine
  modified_base 9: mod_base = OTHER; note = 2'-fluoro uridine
  modified_base 10: mod_base = OTHER; note = 2'-O-methyl adenosine
  modified_base 11: mod_base = OTHER; note = 2'-fluoro guanosine
  modified_base 12: mod_base = OTHER; note = 2'-O-methyl uridine
  modified_base 13: mod_base = OTHER; note = 2'-fluoro uridine phosphorothioate
  modified_base 14: mod_base = OTHER; note = 2'-O-methyl adenosine phosphorothioate
  modified_base 15: mod_base = OTHER; note = 2'-fluoro adenosine triethylene glycol
gtgtagtgtagttaa

SEQ ID NO: 256 - RNA, 15 nt, synthetic construct
  source 1..15: mol_type = other RNA
  modified_base 1: mod_base = OTHER; note = 2'-fluoro uridine phosphorothioate
  modified_base 2: mod_base = OTHER; note = 2'-O-methyl guanosine phosphorothioate
  modified_base 3: mod_base = OTHER; note = 2'-fluoro uridine
  modified_base 4: mod_base = OTHER; note = 2'-O-methyl adenosine
  modified_base 5: mod_base = OTHER; note = 2'-fluoro guanosine
  modified_base 6: mod_base = OTHER; note = 2'-O-methyl uridine
  modified_base 7: mod_base = OTHER; note = 2'-fluoro guanosine
  modified_base 8: mod_base = OTHER; note = 2'-O-methyl uridine
  modified_base 9: mod_base = OTHER; note = 2'-fluoro adenosine
  modified_base 10: mod_base = OTHER; note = 2'-O-methyl guanosine
  modified_base 11: mod_base = OTHER; note = 2'-fluoro uridine
  modified_base 12: mod_base = OTHER; note = 2'-O-methyl uridine
  modified_base 13: mod_base = OTHER; note = 2'-fluoro adenosine phosphorothioate
  modified_base 14: mod_base = OTHER; note = 2'-O-methyl adenosine phosphorothioate
  modified_base 15: mod_base = OTHER; note = 2'-fluoro adenosine triethylene glycol
tgtagtgtagttaaa

SEQ ID NO: 257 - RNA, 15 nt, synthetic construct
  source 1..15: mol_type = other RNA
  modified_base 1: mod_base = OTHER; note = 2'-fluoro guanosine phosphorothioate
  modified_base 2: mod_base = OTHER; note = 2'-O-methyl uridine phosphorothioate
  modified_base 3: mod_base = OTHER; note = 2'-fluoro adenosine
  modified_base 4: mod_base = OTHER; note = 2'-O-methyl guanosine
  modified_base 5: mod_base = OTHER; note = 2'-fluoro uridine
  modified_base 6: mod_base = OTHER; note = 2'-O-methyl guanosine
  modified_base 7: mod_base = OTHER; note = 2'-fluoro uridine
  modified_base 8: mod_base = OTHER; note = 2'-O-methyl adenosine
  modified_base 9: mod_base = OTHER; note = 2'-fluoro guanosine
  modified_base 10: mod_base = OTHER; note = 2'-O-methyl uridine
  modified_base 11: mod_base = OTHER; note = 2'-fluoro uridine
  modified_base 12: mod_base = OTHER; note = 2'-O-methyl adenosine
  modified_base 13: mod_base = OTHER; note = 2'-fluoro adenosine phosphorothioate
  modified_base 14: mod_base = OTHER; note = 2'-O-methyl adenosine phosphorothioate
  modified_base 15: mod_base = OTHER; note = 2'-fluoro adenosine triethylene glycol
gtagtgtagttaaaa

SEQ ID NO: 258 - RNA, 15 nt, synthetic construct
  source 1..15: mol_type = other RNA
  modified_base 1: mod_base = OTHER; note = 2'-fluoro adenosine phosphorothioate
  modified_base 2: mod_base = OTHER; note = 2'-O-methyl guanosine phosphorothioate
  modified_base 3: mod_base = OTHER; note = 2'-fluoro uridine
  modified_base 4: mod_base = OTHER; note = 2'-O-methyl uridine
  modified_base 5: mod_base = OTHER; note = 2'-fluoro adenosine
  modified_base 6: mod_base = OTHER; note = 2'-O-methyl adenosine
  modified_base 7: mod_base = OTHER; note = 2'-fluoro adenosine
  modified_base 8: mod_base = OTHER; note = 2'-O-methyl cytosine
  modified_base 9: mod_base = OTHER; note = 2'-fluoro cytosine
  modified_base 10: mod_base = OTHER; note = 2'-O-methyl adenosine
  modified_base 11: mod_base = OTHER; note = 2'-fluoro guanosine
  modified_base 12: mod_base = OTHER; note = 2'-O-methyl guanosine
  modified_base 13: mod_base = OTHER; note = 2'-fluoro uridine phosphorothioate
  modified_base 14: mod_base = OTHER; note = 2'-O-methyl uridine phosphorothioate
  modified_base 15: mod_base = OTHER; note = 2'-fluoro adenosine triethylene glycol
agttaaaccaggtta

SEQ ID NO: 259 - RNA, 15 nt, synthetic construct
  source 1..15: mol_type = other RNA
  modified_base 1: mod_base = OTHER; note = 2'-fluoro uridine phosphorothioate
  modified_base 2: mod_base = OTHER; note = 2'-O-methyl adenosine phosphorothioate
  modified_base 3: mod_base = OTHER; note = 2'-fluoro adenosine
  modified_base 4: mod_base = OTHER; note = 2'-O-methyl adenosine
  modified_base 5: mod_base = OTHER; note = 2'-fluoro cytosine
  modified_base 6: mod_base = OTHER; note = 2'-O-methyl cytosine
  modified_base 7: mod_base = OTHER; note = 2'-fluoro adenosine
  modified_base 8: mod_base = OTHER; note = 2'-O-methyl guanosine
  modified_base 9: mod_base = OTHER; note = 2'-fluoro guanosine
  modified_base 10: mod_base = OTHER; note = 2'-O-methyl uridine
  modified_base 11: mod_base = OTHER; note = 2'-fluoro uridine
  modified_base 12: mod_base = OTHER; note = 2'-O-methyl uridine
  modified_base 13: mod_base = OTHER; note = 2'-fluoro uridine phosphorothioate
  modified_base 14: mod_base = OTHER; note = 2'-O-methyl adenosine phosphorothioate
  modified_base 15: mod_base = OTHER; note = 2'-fluoro adenosine triethylene glycol
taaaccaggttttaa

SEQ ID NO: 260 - RNA, 15 nt, synthetic construct
  source 1..15: mol_type = other RNA
  modified_base 1: mod_base = OTHER; note = 2'-fluoro adenosine phosphorothioate
  modified_base 2: mod_base = OTHER; note = 2'-O-methyl adenosine phosphorothioate
  modified_base 3: mod_base = OTHER; note = 2'-fluoro adenosine
  modified_base 4: mod_base = OTHER; note = 2'-O-methyl cytosine
  modified_base 5: mod_base = OTHER; note = 2'-fluoro cytosine
  modified_base 6: mod_base = OTHER; note = 2'-O-methyl adenosine
  modified_base 7: mod_base = OTHER; note = 2'-fluoro guanosine
  modified_base 8: mod_base = OTHER; note = 2'-O-methyl guanosine
  modified_base 9: mod_base = OTHER; note = 2'-fluoro uridine
  modified_base 10: mod_base = OTHER; note = 2'-O-methyl uridine
  modified_base 11: mod_base = OTHER; note = 2'-fluoro uridine
  modified_base 12: mod_base = OTHER; note = 2'-O-methyl uridine
  modified_base 13: mod_base = OTHER; note = 2'-fluoro adenosine phosphorothioate
  modified_base 14: mod_base = OTHER; note = 2'-O-methyl adenosine phosphorothioate
  modified_base 15: mod_base = OTHER; note = 2'-fluoro adenosine triethylene glycol
aaaccaggttttaaa

SEQ ID NO: 261 - RNA, 15 nt, synthetic construct
  source 1..15: mol_type = other RNA
  modified_base 1: mod_base = OTHER; note = 2'-fluoro uridine phosphorothioate
  modified_base 2: mod_base = OTHER; note = 2'-O-methyl adenosine phosphorothioate
  modified_base 3: mod_base = OTHER; note = 2'-fluoro guanosine
  modified_base 4: mod_base = OTHER; note = 2'-O-methyl cytosine
  modified_base 5: mod_base = OTHER; note = 2'-fluoro cytosine
  modified_base 6: mod_base = OTHER; note = 2'-O-methyl adenosine
  modified_base 7: mod_base = OTHER; note = 2'-fluoro guanosine
  modified_base 8: mod_base = OTHER; note = 2'-O-methyl adenosine
  modified_base 9: mod_base = OTHER; note = 2'-fluoro guanosine
  modified_base 10: mod_base = OTHER; note = 2'-O-methyl adenosine
  modified_base 11: mod_base = OTHER; note = 2'-fluoro guanosine
  modified_base 12: mod_base = OTHER; note = 2'-O-methyl guanosine
  modified_base 13: mod_base = OTHER; note = 2'-fluoro uridine phosphorothioate
  modified_base 14: mod_base = OTHER; note = 2'-O-methyl guanosine phosphorothioate
  modified_base 15: mod_base = OTHER; note = 2'-fluoro adenosine triethylene glycol
tagccagagaggtga

SEQ ID NO: 262 - RNA, 15 nt, synthetic construct
  source 1..15: mol_type = other RNA
  modified_base 1: mod_base = OTHER; note = 2'-fluoro guanosine phosphorothioate
  modified_base 2: mod_base = OTHER; note = 2'-O-methyl guanosine phosphorothioate
  modified_base 3: mod_base = OTHER; note = 2'-fluoro cytosine
  modified_base 4: mod_base = OTHER; note = 2'-O-methyl adenosine
  modified_base 5: mod_base = OTHER; note = 2'-fluoro guanosine
  modified_base 6: mod_base = OTHER; note = 2'-O-methyl uridine
  modified_base 7: mod_base = OTHER; note = 2'-fluoro uridine
  modified_base 8: mod_base = OTHER; note = 2'-O-methyl guanosine
  modified_base 9: mod_base = OTHER; note = 2'-fluoro guanosine
  modified_base 10: mod_base = OTHER; note = 2'-O-methyl adenosine
  modified_base 11: mod_base = OTHER; note = 2'-fluoro uridine
  modified_base 12: mod_base = OTHER; note = 2'-O-methyl guanosine
  modified_base 13: mod_base = OTHER; note = 2'-fluoro adenosine phosphorothioate
  modified_base 14: mod_base = OTHER; note = 2'-O-methyl guanosine phosphorothioate
  modified_base 15: mod_base = OTHER; note = 2'-fluoro adenosine triethylene glycol
ggcagttggatgaga

SEQ ID NO: 263 - RNA, 15 nt, synthetic construct
  source 1..15: mol_type = other RNA
  modified_base 1: mod_base = OTHER; note = 2'-fluoro uridine phosphorothioate
  modified_base 2: mod_base = OTHER; note = 2'-O-methyl adenosine phosphorothioate
  modified_base 3: mod_base = OTHER; note = 2'-fluoro uridine
  modified_base 4: mod_base = OTHER; note = 2'-O-methyl uridine
  modified_base 5: mod_base = OTHER; note = 2'-fluoro uridine
  modified_base 6: mod_base = OTHER; note = 2'-O-methyl guanosine
  modified_base 7: mod_base = OTHER; note = 2'-fluoro uridine
  modified_base 8: mod_base = OTHER; note = 2'-O-methyl cytosine
  modified_base 9: mod_base = OTHER; note = 2'-fluoro adenosine
  modified_base 10: mod_base = OTHER; note = 2'-O-methyl adenosine
  modified_base 11: mod_base = OTHER; note = 2'-fluoro guanosine
  modified_base 12: mod_base = OTHER; note = 2'-O-methyl uridine
  modified_base 13: mod_base = OTHER; note = 2'-fluoro adenosine phosphorothioate
  modified_base 14: mod_base = OTHER; note = 2'-O-methyl cytosine phosphorothioate
  modified_base 15: mod_base = OTHER; note = 2'-fluoro adenosine triethylene glycol
tatttgtcaagtaca

SEQ ID NO: 264 - RNA, 20 nt, synthetic construct
  source 1..20: mol_type = other RNA
  modified_base 1: mod_base = OTHER; note = 5' phosphate 2'-O-methyl uridine phosphorothioate
  modified_base 2: mod_base = OTHER; note = 2'-fluoro cytosine phosphorothioate
  modified_base 3: mod_base = OTHER; note = 2'-O-methyl adenosine
  modified_base 4: mod_base = OTHER; note = 2'-fluoro guanosine
  modified_base 5: mod_base = OTHER; note = 2'-O-methyl cytosine
  modified_base 6: mod_base = OTHER; note = 2'-fluoro uridine
  modified_base 7: mod_base = OTHER; note = 2'-O-methyl uridine
  modified_base 8: mod_base = OTHER; note = 2'-fluoro uridine
  modified_base 9: mod_base = OTHER; note = 2'-O-methyl uridine
  modified_base 10: mod_base = OTHER; note = 2'-fluoro cytosine
  modified_base 11: mod_base = OTHER; note = 2'-O-methyl cytosine
  modified_base 12: mod_base = OTHER; note = 2'-fluoro adenosine
  modified_base 13: mod_base = OTHER; note = 2'-O-methyl guanosine phosphorothioate
  modified_base 14: mod_base = OTHER; note = 2'-fluoro guanosine phosphorothioate
  modified_base 15: mod_base = OTHER; note = 2'-O-methyl guanosine phosphorothioate
  modified_base 16: mod_base = OTHER; note = 2'-fluoro uridine phosphorothioate
  modified_base 17: mod_base = OTHER; note = 2'-O-methyl cytosine phosphorothioate
  modified_base 18: mod_base = OTHER; note = 2'-fluoro guanosine phosphorothioate
  modified_base 19: mod_base = OTHER; note = 2'-O-methyl cytosine phosphorothioate
  modified_base 20: mod_base = OTHER; note = 2'-fluoro cytosine
tcagcttttccagggtcgcc

SEQ ID NO: 265 - RNA, 20 nt, synthetic construct
  source 1..20: mol_type = other RNA
  modified_base 1: mod_base = OTHER; note = 5' phosphate 2'-O-methyl uridine phosphorothioate
  modified_base 2: mod_base = OTHER; note = 2'-fluoro adenosine phosphorothioate
  modified_base 3: mod_base = OTHER; note = 2'-O-methyl uridine
  modified_base 4: mod_base = OTHER; note = 2'-fluoro cytosine
  modified_base 5: mod_base = OTHER; note = 2'-O-methyl adenosine
  modified_base 6: mod_base = OTHER; note = 2'-fluoro guanosine
  modified_base 7: mod_base = OTHER; note = 2'-O-methyl cytosine
  modified_base 8: mod_base = OTHER; note = 2'-fluoro uridine
  modified_base 9: mod_base = OTHER; note = 2'-O-methyl uridine
  modified_base 10: mod_base = OTHER; note = 2'-fluoro uridine
  modified_base 11: mod_base = OTHER; note = 2'-O-methyl uridine
  modified_base 12: mod_base = OTHER; note = 2'-fluoro cytosine
  modified_base 13: mod_base = OTHER; note = 2'-O-methyl cytosine phosphorothioate
  modified_base 14: mod_base = OTHER; note = 2'-fluoro adenosine phosphorothioate
  modified_base 15: mod_base = OTHER; note = 2'-O-methyl guanosine phosphorothioate
  modified_base 16: mod_base = OTHER; note = 2'-fluoro guanosine phosphorothioate
  modified_base 17: mod_base = OTHER; note = 2'-O-methyl guanosine phosphorothioate
  modified_base 18: mod_base = OTHER; note = 2'-fluoro uridine phosphorothioate
  modified_base 19: mod_base = OTHER; note = 2'-O-methyl cytosine phosphorothioate
  modified_base 20: mod_base = OTHER; note = 2'-fluoro guanosine
tatcagcttttccagggtcg

SEQ ID NO: 266 - RNA, 20 nt, synthetic construct
  source 1..20: mol_type = other RNA
  modified_base 1: mod_base = OTHER; note = 5' phosphate 2'-O-methyl uridine phosphorothioate
  modified_base 2: mod_base = OTHER; note = 2'-fluoro uridine phosphorothioate
  modified_base 3: mod_base = OTHER; note = 2'-O-methyl uridine
  modified_base 4: mod_base = OTHER; note = 2'-fluoro cytosine
  modified_base 5: mod_base = OTHER; note = 2'-O-methyl adenosine
  modified_base 6: mod_base = OTHER; note = 2'-fluoro uridine
  modified_base 7: mod_base = OTHER; note = 2'-O-methyl cytosine
  modified_base 8: mod_base = OTHER; note = 2'-fluoro adenosine
  modified_base 9: mod_base = OTHER; note = 2'-O-methyl guanosine
  modified_base 10: mod_base = OTHER; note = 2'-fluoro cytosine
  modified_base 11: mod_base = OTHER; note = 2'-O-methyl uridine
  modified_base 12: mod_base = OTHER; note = 2'-fluoro uridine
  modified_base 13: mod_base = OTHER; note = 2'-O-methyl uridine phosphorothioate
  modified_base 14: mod_base = OTHER; note = 2'-fluoro uridine phosphorothioate
  modified_base 15: mod_base = OTHER; note = 2'-O-methyl cytosine phosphorothioate
  modified_base 16: mod_base = OTHER; note = 2'-fluoro cytosine phosphorothioate
  modified_base 17: mod_base = OTHER; note = 2'-O-methyl adenosine phosphorothioate
  modified_base 18: mod_base = OTHER; note = 2'-fluoro guanosine phosphorothioate
  modified_base 19: mod_base = OTHER; note = 2'-O-methyl guanosine phosphorothioate
  modified_base 20: mod_base = OTHER; note = 2'-fluoro guanosine
tttcatcagcttttccaggg

SEQ ID NO: 267 - RNA, 20 nt, synthetic construct
  source 1..20: mol_type = other RNA
  modified_base 1: mod_base = OTHER; note = 5' phosphate 2'-O-methyl uridine phosphorothioate
  modified_base 2: mod_base = OTHER; note = 2'-fluoro cytosine phosphorothioate
  modified_base 3: mod_base = OTHER; note = 2'-O-methyl cytosine
  modified_base 4: mod_base = OTHER; note = 2'-fluoro uridine
  modified_base 5: mod_base = OTHER; note = 2'-O-methyl uridine
  modified_base 6: mod_base = OTHER; note = 2'-fluoro cytosine
  modified_base 7: mod_base = OTHER; note = 2'-O-methyl adenosine
  modified_base 8: mod_base = OTHER; note = 2'-fluoro uridine
  modified_base 9: mod_base = OTHER; note = 2'-O-methyl cytosine
  modified_base 10: mod_base = OTHER; note = 2'-fluoro adenosine
  modified_base 11: mod_base = OTHER; note = 2'-O-methyl guanosine
  modified_base 12: mod_base = OTHER; note = 2'-fluoro cytosine
  modified_base 13: mod_base = OTHER; note = 2'-O-methyl uridine phosphorothioate
  modified_base 14: mod_base = OTHER; note = 2'-fluoro uridine phosphorothioate
  modified_base 15: mod_base = OTHER; note = 2'-O-methyl uridine phosphorothioate
  modified_base 16: mod_base = OTHER; note = 2'-fluoro uridine phosphorothioate
  modified_base 17: mod_base = OTHER; note = 2'-O-methyl cytosine phosphorothioate
  modified_base 18: mod_base = OTHER; note = 2'-fluoro cytosine phosphorothioate
  modified_base 19: mod_base = OTHER; note = 2'-O-methyl adenosine phosphorothioate
  modified_base 20: mod_base = OTHER; note = 2'-fluoro guanosine
tccttcatcagcttttccag

SEQ ID NO: 268 - RNA, 20 nt, synthetic construct
  source 1..20: mol_type = other RNA
  modified_base 1: mod_base = OTHER; note = 5' phosphate 2'-O-methyl uridine phosphorothioate
  modified_base 2: mod_base = OTHER; note = 2'-fluoro guanosine phosphorothioate
  modified_base 3: mod_base = OTHER; note = 2'-O-methyl guanosine
  modified_base 4: mod_base = OTHER; note = 2'-fluoro cytosine
  modified_base 5: mod_base = OTHER; note = 2'-O-methyl cytosine
  modified_base 6: mod_base = OTHER; note = 2'-fluoro uridine
  modified_base 7: mod_base = OTHER; note = 2'-O-methyl uridine
  modified_base 8: mod_base = OTHER; note = 2'-fluoro cytosine
  modified_base 9: mod_base = OTHER; note = 2'-O-methyl adenosine
  modified_base 10: mod_base = OTHER; note = 2'-fluoro uridine
  modified_base 11: mod_base = OTHER; note = 2'-O-methyl cytosine
  modified_base 12: mod_base = OTHER; note = 2'-fluoro adenosine
  modified_base 13: mod_base = OTHER; note = 2'-O-methyl guanosine phosphorothioate
  modified_base 14: mod_base = OTHER; note = 2'-fluoro cytosine phosphorothioate
  modified_base 15: mod_base = OTHER; note = 2'-O-methyl uridine phosphorothioate
  modified_base 16: mod_base = OTHER; note = 2'-fluoro uridine phosphorothioate
  modified_base 17: mod_base = OTHER; note = 2'-O-methyl uridine phosphorothioate
  modified_base 18: mod_base = OTHER; note = 2'-fluoro uridine phosphorothioate
  modified_base 19: mod_base = OTHER; note = 2'-O-methyl cytosine phosphorothioate
  modified_base 20: mod_base = OTHER; note = 2'-fluoro cytosine
tggccttcatcagcttttcc

SEQ ID NO: 269 - RNA, 20 nt, synthetic construct
  source 1..20: mol_type = other RNA
  modified_base 1: mod_base = OTHER; note = 5' phosphate 2'-O-methyl uridine phosphorothioate
  modified_base 2: mod_base = OTHER; note = 2'-fluoro cytosine phosphorothioate
  modified_base 3: mod_base = OTHER; note = 2'-O-methyl uridine
  modified_base 4: mod_base = OTHER; note = 2'-fluoro cytosine
  modified_base 5: mod_base = OTHER; note = 2'-O-methyl guanosine
  modified_base 6: mod_base = OTHER; note = 2'-fluoro adenosine
  modified_base 7: mod_base = OTHER; note = 2'-O-methyl adenosine
  modified_base 8: mod_base = OTHER; note = 2'-fluoro guanosine
  modified_base 9: mod_base = OTHER; note = 2'-O-methyl guanosine
  modified_base 10: mod_base = OTHER; note = 2'-fluoro cytosine
  modified_base 11: mod_base = OTHER; note = 2'-O-methyl cytosine
  modified_base 12: mod_base = OTHER; note = 2'-fluoro uridine
  modified_base 13: mod_base = OTHER; note = 2'-O-methyl uridine phosphorothioate
  modified_base 14: mod_base = OTHER; note = 2'-fluoro cytosine phosphorothioate
  modified_base 15: mod_base = OTHER; note = 2'-O-methyl adenosine phosphorothioate
  modified_base 16: mod_base = OTHER; note = 2'-fluoro uridine phosphorothioate
  modified_base 17: mod_base = OTHER; note = 2'-O-methyl cytosine phosphorothioate
  modified_base 18: mod_base = OTHER; note = 2'-fluoro adenosine phosphorothioate
  modified_base 19: mod_base = OTHER; note = 2'-O-methyl guanosine phosphorothioate
  modified_base 20: mod_base = OTHER; note = 2'-fluoro cytosine
tctcgaaggccttcatcagc

SEQ ID NO: 270 - RNA, 20 nt, synthetic construct
  source 1..20: mol_type = other RNA
  modified_base 1: mod_base = OTHER; note = 5' phosphate 2'-O-methyl uridine phosphorothioate
  modified_base 2: mod_base = OTHER; note = 2'-fluoro guanosine phosphorothioate
  modified_base 3: mod_base = OTHER; note = 2'-O-methyl adenosine
  modified_base 4: mod_base = OTHER; note = 2'-fluoro cytosine
  modified_base 5: mod_base = OTHER; note = 2'-O-methyl uridine
  modified_base 6: mod_base = OTHER; note = 2'-fluoro cytosine
  modified_base 7: mod_base = OTHER; note = 2'-O-methyl guanosine
  modified_base 8: mod_base = OTHER; note = 2'-fluoro adenosine
  modified_base 9: mod_base = OTHER; note = 2'-O-methyl adenosine
  modified_base 10: mod_base = OTHER; note = 2'-fluoro guanosine
  modified_base 11: mod_base = OTHER; note = 2'-O-methyl guanosine
  modified_base 12: mod_base = OTHER; note = 2'-fluoro cytosine
  modified_base 13: mod_base = OTHER; note = 2'-O-methyl cytosine phosphorothioate
  modified_base 14: mod_base = OTHER; note = 2'-fluoro uridine phosphorothioate
  modified_base 15: mod_base = OTHER; note = 2'-O-methyl uridine phosphorothioate
  modified_base 16: mod_base = OTHER; note = 2'-fluoro cytosine phosphorothioate
  modified_base 17: mod_base = OTHER; note = 2'-O-methyl adenosine phosphorothioate
  modified_base 18: mod_base = OTHER; note = 2'-fluoro uridine phosphorothioate
  modified_base 19: mod_base = OTHER; note = 2'-O-methyl cytosine phosphorothioate
  modified_base 20: mod_base = OTHER; note = 2'-fluoro adenosine
tgactcgaaggccttcatca

SEQ ID NO: 271 - RNA, 20 nt, synthetic construct
  source 1..20: mol_type = other RNA
  modified_base 1: mod_base = OTHER; note = 5' phosphate 2'-O-methyl uridine phosphorothioate
  modified_base 2: mod_base = OTHER; note = 2'-fluoro uridine phosphorothioate
  modified_base 3: mod_base = OTHER; note = 2'-O-methyl uridine
  modified_base 4: mod_base = OTHER; note = 2'-fluoro guanosine
  modified_base 5: mod_base = OTHER; note = 2'-O-methyl adenosine
  modified_base 6: mod_base = OTHER; note = 2'-fluoro guanosine
  modified_base 7: mod_base = OTHER; note = 2'-O-methyl guanosine
  modified_base 8: mod_base = OTHER; note = 2'-fluoro guanosine
  modified_base 9: mod_base = OTHER; note = 2'-O-methyl adenosine
  modified_base 10: mod_base = OTHER; note = 2'-fluoro cytosine
  modified_base 11: mod_base = OTHER; note = 2'-O-methyl uridine
  modified_base 12: mod_base = OTHER; note = 2'-fluoro cytosine
  modified_base 13: mod_base = OTHER; note = 2'-O-methyl guanosine phosphorothioate
  modified_base 14: mod_base = OTHER; note = 2'-fluoro adenosine phosphorothioate
  modified_base 15: mod_base = OTHER; note = 2'-O-methyl adenosine phosphorothioate
  modified_base 16: mod_base = OTHER; note = 2'-fluoro guanosine phosphorothioate
  modified_base 17: mod_base = OTHER; note = 2'-O-methyl guanosine phosphorothioate
  modified_base 18: mod_base = OTHER; note = 2'-fluoro cytosine phosphorothioate
  modified_base 19: mod_base = OTHER; note = 2'-O-methyl cytosine phosphorothioate
  modified_base 20: mod_base = OTHER; note = 2'-fluoro uridine
tttgagggactcgaaggcct

SEQ ID NO: 272 - RNA, 20 nt, synthetic construct
  source 1..20: mol_type = other RNA
  modified_base 1: mod_base = OTHER; note = 5' phosphate 2'-O-methyl uridine phosphorothioate
  modified_base 2: mod_base = OTHER; note = 2'-fluoro adenosine phosphorothioate
  modified_base 3: mod_base = OTHER; note = 2'-O-methyl cytosine
  modified_base 4: mod_base = OTHER; note = 2'-fluoro uridine
  modified_base 5: mod_base = OTHER; note = 2'-O-methyl uridine
  modified_base 6: mod_base = OTHER; note = 2'-fluoro guanosine
  modified_base 7: mod_base = OTHER; note = 2'-O-methyl adenosine
  modified_base 8: mod_base = OTHER; note = 2'-fluoro guanosine
  modified_base 9: mod_base = OTHER; note = 2'-O-methyl guanosine
  modified_base 10: mod_base = OTHER; note = 2'-fluoro guanosine
  modified_base 11: mod_base = OTHER; note = 2'-O-methyl adenosine
  modified_base 12: mod_base = OTHER; note = 2'-fluoro cytosine
  modified_base 13: mod_base = OTHER; note = 2'-O-methyl uridine phosphorothioate
  modified_base 14: mod_base = OTHER; note = 2'-fluoro cytosine phosphorothioate
  modified_base 15: mod_base = OTHER; note = 2'-O-methyl guanosine phosphorothioate
  modified_base 16: mod_base = OTHER; note = 2'-fluoro adenosine phosphorothioate
  modified_base 17: mod_base = OTHER; note = 2'-O-methyl adenosine phosphorothioate
  modified_base 18: mod_base = OTHER; note = 2'-fluoro guanosine phosphorothioate
  modified_base 19: mod_base = OTHER; note = 2'-O-methyl guanosine phosphorothioate
  modified_base 20: mod_base = OTHER; note = 2'-fluoro cytosine
tacttgagggactcgaaggc

SEQ ID NO: 273 - RNA, 20 nt, synthetic construct
  source 1..20: mol_type = other RNA
  modified_base 1: mod_base = OTHER; note = 5' phosphate 2'-O-methyl uridine phosphorothioate
  modified_base 2: mod_base = OTHER; note = 2'-fluoro guanosine phosphorothioate
  modified_base 3: mod_base = OTHER; note = 2'-O-methyl guanosine
  modified_base 4: mod_base = OTHER; note = 2'-fluoro adenosine
  modified_base 5: mod_base = OTHER; note = 2'-O-methyl cytosine
  modified_base 6: mod_base = OTHER; note = 2'-fluoro uridine
  modified_base 7: mod_base = OTHER; note = 2'-O-methyl uridine
  modified_base 8: mod_base = OTHER; note = 2'-fluoro guanosine
  modified_base 9: mod_base = OTHER; note = 2'-O-methyl adenosine
  modified_base 10: mod_base = OTHER; note = 2'-fluoro guanosine
  modified_base 11: mod_base = OTHER; note = 2'-O-methyl guanosine
  modified_base 12: mod_base = OTHER; note = 2'-fluoro guanosine
  modified_base 13: mod_base = OTHER; note = 2'-O-methyl adenosine phosphorothioate
  modified_base 14: mod_base = OTHER; note = 2'-fluoro cytosine phosphorothioate
  modified_base 15: mod_base = OTHER; note = 2'-O-methyl uridine phosphorothioate
  modified_base 16: mod_base = OTHER; note = 2'-fluoro cytosine phosphorothioate
  modified_base 17: mod_base = OTHER; note = 2'-O-methyl guanosine phosphorothioate
  modified_base 18: mod_base = OTHER; note = 2'-fluoro adenosine phosphorothioate
  modified_base 19: mod_base = OTHER; note = 2'-O-methyl adenosine phosphorothioate
  modified_base 20: mod_base = OTHER; note = 2'-fluoro guanosine
tggacttgagggactcgaag

SEQ ID NO: 274 - RNA, 20 nt, synthetic construct
  source 1..20: mol_type = other RNA
  modified_base 1: mod_base = OTHER; note = 5' phosphate 2'-O-methyl uridine phosphorothioate
  modified_base 2: mod_base = OTHER; note = 2'-fluoro adenosine phosphorothioate
  modified_base 3: mod_base = OTHER; note = 2'-O-methyl adenosine
  modified_base 4: mod_base = OTHER; note = 2'-fluoro guanosine
  modified_base 5: mod_base = OTHER; note = 2'-O-methyl guanosine
  modified_base 6: mod_base = OTHER; note = 2'-fluoro adenosine
  modified_base 7: mod_base = OTHER; note = 2'-O-methyl cytosine
  modified_base 8: mod_base = OTHER; note = 2'-fluoro uridine
  modified_base 9: mod_base = OTHER; note = 2'-O-methyl uridine
  modified_base 10: mod_base = OTHER; note = 2'-fluoro guanosine
  modified_base 11: mod_base = OTHER; note = 2'-O-methyl adenosine
  modified_base 12: mod_base = OTHER; note = 2'-fluoro guanosine
  modified_base 13: mod_base = OTHER; note = 2'-O-methyl guanosine phosphorothioate
  modified_base 14: mod_base = OTHER; note = 2'-fluoro guanosine phosphorothioate
  modified_base 15: mod_base = OTHER; note = 2'-O-methyl adenosine phosphorothioate
  modified_base 16: mod_base = OTHER; note = 2'-fluoro cytosine phosphorothioate
  modified_base 17: mod_base = OTHER; note = 2'-O-methyl uridine phosphorothioate
  modified_base 18: mod_base = OTHER; note = 2'-fluoro cytosine phosphorothioate
  modified_base 19: mod_base = OTHER; note = 2'-O-methyl guanosine phosphorothioate
  modified_base 20: mod_base = OTHER; note = 2'-fluoro adenosine
taaggacttgagggactcga

SEQ ID NO: 275 - RNA, 20 nt, synthetic construct
  source 1..20: mol_type = other RNA
  modified_base 1: mod_base = OTHER; note = 5' phosphate 2'-O-methyl uridine phosphorothioate
  modified_base 2: mod_base = OTHER; note = 2'-fluoro guanosine phosphorothioate
  modified_base 3: mod_base = OTHER; note = 2'-O-methyl guanosine
  modified_base 4: mod_base = OTHER; note = 2'-fluoro adenosine
  modified_base 5: mod_base = OTHER; note = 2'-O-methyl adenosine
  modified_base 6: mod_base = OTHER; note = 2'-fluoro guanosine
  modified_base 7: mod_base = OTHER; note = 2'-O-methyl guanosine
  modified_base 8: mod_base = OTHER; note = 2'-fluoro adenosine
  modified_base 9: mod_base = OTHER; note = 2'-O-methyl cytosine
  modified_base 10: mod_base = OTHER; note = 2'-fluoro uridine
  modified_base 11: mod_base = OTHER; note = 2'-O-methyl uridine
  modified_base 12: mod_base = OTHER; note = 2'-fluoro guanosine
  modified_base 13: mod_base = OTHER; note = 2'-O-methyl adenosine phosphorothioate
  modified_base 14: mod_base = OTHER; note = 2'-fluoro guanosine phosphorothioate
  modified_base 15: mod_base = OTHER; note = 2'-O-methyl guanosine phosphorothioate
  modified_base 16: mod_base = OTHER; note = 2'-fluoro guanosine phosphorothioate
  modified_base 17: mod_base = OTHER; note = 2'-O-methyl adenosine phosphorothioate
  modified_base 18: mod_base = OTHER; note = 2'-fluoro cytosine phosphorothioate
  modified_base 19: mod_base = OTHER; note = 2'-O-methyl uridine phosphorothioate
  modified_base 20: mod_base = OTHER; note = 2'-fluoro cytosine
tggaaggacttgagggactc

SEQ ID NO: 276 - RNA, 20 nt, synthetic construct
  source 1..20: mol_type = other RNA
  modified_base 1: mod_base = OTHER; note = 5' phosphate 2'-O-methyl uridine phosphorothioate
  modified_base 2: mod_base = OTHER; note = 2'-fluoro guanosine phosphorothioate
  modified_base 3: mod_base = OTHER; note = 2'-O-methyl cytosine
  modified_base 4: mod_base = OTHER; note = 2'-fluoro uridine
  modified_base 5: mod_base = OTHER; note = 2'-O-methyl guanosine
  modified_base 6: mod_base = OTHER; note = 2'-fluoro guanosine
  modified_base 7: mod_base = OTHER; note = 2'-O-methyl adenosine
  modified_base 8: mod_base = OTHER; note = 2'-fluoro adenosine
  modified_base 9: mod_base = OTHER; note = 2'-O-methyl guanosine
  modified_base 10: mod_base = OTHER; note = 2'-fluoro guanosine
  modified_base 11: mod_base = OTHER; note = 2'-O-methyl adenosine
  modified_base 12: mod_base = OTHER; note = 2'-fluoro cytosine
  modified_base 13: mod_base = OTHER; note = 2'-O-methyl uridine phosphorothioate
  modified_base 14: mod_base = OTHER; note = 2'-fluoro uridine phosphorothioate
  modified_base 15: mod_base = OTHER; note = 2'-O-methyl guanosine phosphorothioate
  modified_base 16: mod_base = OTHER; note = 2'-fluoro adenosine phosphorothioate
  modified_base 17: mod_base = OTHER; note = 2'-O-methyl guanosine phosphorothioate
  modified_base 18: mod_base = OTHER; note = 2'-fluoro guanosine phosphorothioate
  modified_base 19: mod_base = OTHER; note = 2'-O-methyl guanosine phosphorothioate
  modified_base 20: mod_base = OTHER; note = 2'-fluoro adenosine
tgctggaaggacttgaggga

SEQ ID NO: 277 - RNA, 20 nt, synthetic construct
  source 1..20: mol_type = other RNA
  modified_base 1: mod_base = OTHER; note = 5' phosphate 2'-O-methyl uridine phosphorothioate
  modified_base 2: mod_base = OTHER; note = 2'-fluoro guanosine phosphorothioate
  modified_base 3: mod_base = OTHER; note = 2'-O-methyl guanosine
  modified_base 4: mod_base = OTHER; note = 2'-fluoro cytosine
  modified_base 5: mod_base = OTHER; note = 2'-O-methyl guanosine
  modified_base 6: mod_base = OTHER; note = 2'-fluoro guanosine
  modified_base 7: mod_base = OTHER; note = 2'-O-methyl cytosine
  modified_base 8: mod_base = OTHER; note = 2'-fluoro uridine
  modified_base 9: mod_base = OTHER; note = 2'-O-methyl guanosine
  modified_base 10: mod_base = OTHER; note = 2'-fluoro uridine
  modified_base 11: mod_base = OTHER; note = 2'-O-methyl uridine
  modified_base 12: mod_base = OTHER; note = 2'-fluoro guanosine
  modified_base 13: mod_base = OTHER; note = 2'-O-methyl cytosine phosphorothioate
  modified_base 14: mod_base = OTHER; note = 2'-fluoro uridine phosphorothioate
  modified_base 15: mod_base = OTHER; note = 2'-O-methyl guanosine phosphorothioate
  modified_base 16: mod_base = OTHER; note = 2'-fluoro cytosine phosphorothioate
  modified_base 17: mod_base = OTHER; note = 2'-O-methyl uridine phosphorothioate
  modified_base 18: mod_base = OTHER; note = 2'-fluoro guanosine phosphorothioate
  modified_base 19: mod_base = OTHER; note = 2'-O-methyl cytosine phosphorothioate
  modified_base 20: mod_base = OTHER; note = 2'-fluoro uridine
tggcggctgttgctgctgct

SEQ ID NO: 278 - RNA, 20 nt, synthetic construct
  source 1..20: mol_type = other RNA
  modified_base 1: mod_base = OTHER; note = 5' phosphate 2'-O-methyl uridine phosphorothioate
  modified_base 2: mod_base = OTHER; note = 2'-fluoro guanosine phosphorothioate
  modified_base 3: mod_base = OTHER; note = 2'-O-methyl guanosine
  modified_base 4: mod_base = OTHER; note = 2'-fluoro uridine
  modified_base 5: mod_base = OTHER; note = 2'-O-methyl guanosine
  modified_base 6: mod_base = OTHER; note = 2'-fluoro guanosine
  modified_base 7: mod_base = OTHER; note = 2'-O-methyl cytosine
  modified_base 8: mod_base = OTHER; note = 2'-fluoro guanosine
  modified_base 9: mod_base = OTHER; note = 2'-O-methyl guanosine
  modified_base 10: mod_base = OTHER; note = 2'-fluoro cytosine
  modified_base 11: mod_base = OTHER; note = 2'-O-methyl uridine
  modified_base 12: mod_base = OTHER; note = 2'-fluoro guanosine
  modified_base 13: mod_base = OTHER; note = 2'-O-methyl uridine phosphorothioate
  modified_base 14: mod_base = OTHER; note = 2'-fluoro uridine phosphorothioate
  modified_base 15: mod_base = OTHER; note = 2'-O-methyl guanosine phosphorothioate
  modified_base 16: mod_base = OTHER; note = 2'-fluoro cytosine phosphorothioate
  modified_base 17: mod_base = OTHER; note = 2'-O-methyl uridine phosphorothioate
  modified_base 18: mod_base = OTHER; note = 2'-fluoro guanosine phosphorothioate
  modified_base 19: mod_base = OTHER; note = 2'-O-methyl cytosine phosphorothioate
  modified_base 20: mod_base = OTHER; note = 2'-fluoro uridine
tggtggcggctgttgctgct

SEQ ID NO: 279 - RNA, 20 nt, synthetic construct
  source 1..20: mol_type = other RNA
  modified_base 1: mod_base = OTHER; note = 5' phosphate 2'-O-methyl uridine phosphorothioate
  modified_base 2: mod_base = OTHER; note = 2'-fluoro uridine phosphorothioate
  modified_base 3: mod_base = OTHER; note = 2'-O-methyl guanosine
  modified_base 4: mod_base = OTHER; note = 2'-fluoro adenosine
  modified_base 5: mod_base = OTHER; note = 2'-O-methyl guanosine
  modified_base 6: mod_base = OTHER; note = 2'-fluoro guanosine
  modified_base 7: mod_base = OTHER; note = 2'-O-methyl adenosine
  modified_base 8: mod_base = OTHER; note = 2'-fluoro adenosine
  modified_base 9: mod_base = OTHER; note = 2'-O-methyl guanosine
  modified_base 10: mod_base = OTHER; note = 2'-fluoro cytosine
  modified_base 11: mod_base = OTHER; note = 2'-O-methyl uridine
  modified_base 12: mod_base = OTHER; note = 2'-fluoro guanosine
  modified_base 13: mod_base = OTHER; note = 2'-O-methyl adenosine phosphorothioate
  modified_base 14: mod_base = OTHER; note = 2'-fluoro guanosine phosphorothioate
  modified_base 15: mod_base = OTHER; note = 2'-O-methyl guanosine phosphorothioate
  modified_base 16: mod_base = OTHER; note = 2'-fluoro adenosine phosphorothioate
  modified_base 17: mod_base = OTHER; note = 2'-O-methyl guanosine phosphorothioate
  modified_base 18: mod_base = OTHER; note = 2'-fluoro guanosine phosphorothioate
  modified_base 19: mod_base = OTHER; note = 2'-O-methyl cytosine phosphorothioate
  modified_base 20: mod_base = OTHER; note = 2'-fluoro guanosine
ttgaggaagctgaggaggcg

SEQ ID NO: 280 - RNA, 20 nt, synthetic construct
  source 1..20: mol_type = other RNA
  modified_base 1: mod_base = OTHER; note = 5' phosphate 2'-O-methyl uridine phosphorothioate
  modified_base 2: mod_base = OTHER; note = 2'-fluoro guanosine phosphorothioate
  modified_base 3: mod_base = OTHER; note = 2'-O-methyl cytosine
  modified_base 4: mod_base = OTHER; note = 2'-fluoro uridine
  modified_base 5: mod_base = OTHER; note = 2'-O-methyl guanosine
  modified_base 6: mod_base = OTHER; note = 2'-fluoro adenosine
  modified_base 7: mod_base = OTHER; note = 2'-O-methyl guanosine
  modified_base 8: mod_base = OTHER; note = 2'-fluoro guanosine
  modified_base 9: mod_base = OTHER; note = 2'-O-methyl adenosine
  modified_base 10: mod_base = OTHER; note = 2'-fluoro adenosine
  modified_base 11: mod_base = OTHER; note = 2'-O-methyl guanosine
  modified_base 12: mod_base = OTHER; note = 2'-fluoro cytosine
  modified_base 13: mod_base = OTHER; note = 2'-O-methyl uridine phosphorothioate
  modified_base 14: mod_base = OTHER; note = 2'-fluoro guanosine phosphorothioate
  modified_base 15: mod_base = OTHER; note = 2'-O-methyl adenosine phosphorothioate
  modified_base 16: mod_base = OTHER; note = 2'-fluoro guanosine phosphorothioate
  modified_base 17: mod_base = OTHER; note = 2'-O-methyl guanosine phosphorothioate
  modified_base 18: mod_base = OTHER; note = 2'-fluoro adenosine phosphorothioate
  modified_base 19: mod_base = OTHER; note = 2'-O-methyl guanosine phosphorothioate
  modified_base 20: mod_base = OTHER; note = 2'-fluoro guanosine
tgctgaggaagctgaggagg

SEQ ID NO: 281 - RNA, 20 nt, synthetic construct
  source 1..20: mol_type = other RNA
  modified_base 1: mod_base = OTHER; note = 5' phosphate 2'-O-methyl uridine phosphorothioate
  modified_base 2: mod_base = OTHER; note = 2'-fluoro cytosine phosphorothioate
  modified_base 3: mod_base = OTHER; note = 2'-O-methyl guanosine
  modified_base 4: mod_base = OTHER; note = 2'-fluoro guanosine
  modified_base 5: mod_base = OTHER; note = 2'-O-methyl cytosine
  modified_base 6: mod_base = OTHER; note = 2'-fluoro uridine
  modified_base 7: mod_base = OTHER; note = 2'-O-methyl guanosine
  modified_base 8: mod_base = OTHER; note = 2'-fluoro adenosine
  modified_base 9: mod_base = OTHER; note = 2'-O-methyl guanosine
  modified_base 10: mod_base = OTHER; note = 2'-fluoro guanosine
  modified_base 11: mod_base = OTHER; note = 2'-O-methyl adenosine
  modified_base 12: mod_base = OTHER; note = 2'-fluoro adenosine
  modified_base 13: mod_base = OTHER; note = 2'-O-methyl guanosine phosphorothioate
  modified_base 14: mod_base = OTHER; note = 2'-fluoro cytosine phosphorothioate
  modified_base 15: mod_base = OTHER; note = 2'-O-methyl uridine phosphorothioate
  modified_base 16: mod_base = OTHER; note = 2'-fluoro guanosine phosphorothioate
  modified_base 17: mod_base = OTHER; note = 2'-O-methyl adenosine phosphorothioate
  modified_base 18: mod_base = OTHER; note = 2'-fluoro guanosine phosphorothioate
  modified_base 19: mod_base = OTHER; note = 2'-O-methyl guanosine phosphorothioate
  modified_base 20: mod_base = OTHER; note = 2'-fluoro adenosine
tcggctgaggaagctgagga

SEQ ID NO: 282 - RNA, 20 nt, synthetic construct
  source 1..20: mol_type = other RNA
  modified_base 1: mod_base = OTHER; note = 5' phosphate 2'-O-methyl uridine phosphorothioate
  modified_base 2: mod_base = OTHER; note = 2'-fluoro guanosine phosphorothioate
  modified_base 3: mod_base = OTHER; note = 2'-O-methyl adenosine
  modified_base 4: mod_base = OTHER; note = 2'-fluoro guanosine
  modified_base 5: mod_base = OTHER; note = 2'-O-methyl guanosine
  modified_base 6: mod_base = OTHER; note = 2'-fluoro cytosine
  modified_base 7: mod_base = OTHER; note = 2'-O-methyl adenosine
  modified_base 8: mod_base = OTHER; note = 2'-fluoro guanosine
  modified_base 9: mod_base = OTHER; note = 2'-O-methyl cytosine
  modified_base 10: mod_base = OTHER; note = 2'-fluoro adenosine
  modified_base 11: mod_base = OTHER; note = 2'-O-methyl guanosine
  modified_base 12: mod_base = OTHER; note = 2'-fluoro cytosine
  modified_base 13: mod_base = OTHER; note = 2'-O-methyl guanosine phosphorothioate
  modified_base 14: mod_base = OTHER; note = 2'-fluoro guanosine phosphorothioate
  modified_base 15: mod_base = OTHER; note = 2'-O-methyl cytosine phosphorothioate
  modified_base 16: mod_base = OTHER; note = 2'-fluoro uridine phosphorothioate
  modified_base 17: mod_base = OTHER; note = 2'-O-methyl guanosine phosphorothioate
  modified_base 18: mod_base = OTHER; note = 2'-fluoro uridine phosphorothioate
  modified_base 19: mod_base = OTHER; note = 2'-O-methyl guanosine phosphorothioate
  modified_base 20: mod_base = OTHER; note = 2'-fluoro cytosine
tgaggcagcagcggctgtgc

SEQ ID NO: 283 - RNA, 20 nt, synthetic construct
  source 1..20: mol_type = other RNA
  modified_base 1: mod_base = OTHER; note = 5' phosphate 2'-O-methyl uridine phosphorothioate
  modified_base 2: mod_base = OTHER; note = 2'-fluoro guanosine phosphorothioate
  modified_base 3: mod_base = OTHER; note = 2'-O-methyl cytosine
  modified_base 4: mod_base = OTHER; note = 2'-fluoro guanosine
  modified_base 5: mod_base = OTHER; note = 2'-O-methyl guanosine
  modified_base 6: mod_base = OTHER; note = 2'-fluoro cytosine
  modified_base 7: mod_base = OTHER; note = 2'-O-methyl uridine
  modified_base 8: mod_base = OTHER; note = 2'-fluoro cytosine
  modified_base 9: mod_base = OTHER; note = 2'-O-methyl cytosine
  modified_base 10: mod_base = OTHER; note = 2'-fluoro uridine
  modified_base 11: mod_base = OTHER; note = 2'-O-methyl cytosine
  modified_base 12: mod_base = OTHER; note = 2'-fluoro adenosine
  modified_base 13: mod_base = OTHER; note = 2'-O-methyl guanosine phosphorothioate
  modified_base 14: mod_base = OTHER; note = 2'-fluoro cytosine phosphorothioate
  modified_base 15: mod_base = OTHER; note = 2'-O-methyl cytosine phosphorothioate
  modified_base 16: mod_base = OTHER; note = 2'-fluoro adenosine phosphorothioate
  modified_base 17: mod_base = OTHER; note = 2'-O-methyl cytosine phosphorothioate
  modified_base 18: mod_base = OTHER; note = 2'-fluoro adenosine phosphorothioate
  modified_base 19: mod_base = OTHER; note = 2'-O-methyl guanosine phosphorothioate
  modified_base 20: mod_base = OTHER; note = 2'-fluoro cytosine
tgcggctcctcagccacagc

SEQ ID NO: 284 - RNA, 20 nt, synthetic construct
  source 1..20: mol_type = other RNA
  modified_base 1: mod_base = OTHER; note = 5' phosphate 2'-O-methyl uridine phosphorothioate
  modified_base 2: mod_base = OTHER; note = 2'-fluoro uridine phosphorothioate
  modified_base 3: mod_base = OTHER; note = 2'-O-methyl guanosine
  modified_base 4: mod_base = OTHER; note = 2'-fluoro cytosine
  modified_base 5: mod_base = OTHER; note = 2'-O-methyl adenosine
  modified_base 6: mod_base = OTHER; note = 2'-fluoro guanosine
  modified_base 7: mod_base = OTHER; note = 2'-O-methyl cytosine
  modified_base 8: mod_base = OTHER; note = 2'-fluoro guanosine
  modified_base 9: mod_base = OTHER; note = 2'-O-methyl guanosine
  modified_base 10: mod_base = OTHER; note = 2'-fluoro cytosine
  modified_base 11: mod_base = OTHER; note = 2'-O-methyl uridine
  modified_base 12: mod_base = OTHER; note = 2'-fluoro cytosine
  modified_base 13: mod_base = OTHER; note = 2'-O-methyl cytosine phosphorothioate
  modified_base 14: mod_base = OTHER; note = 2'-fluoro uridine phosphorothioate
  modified_base 15: mod_base = OTHER; note = 2'-O-methyl cytosine phosphorothioate
  modified_base 16: mod_base = OTHER; note = 2'-fluoro adenosine phosphorothioate
  modified_base 17: mod_base = OTHER; note = 2'-O-methyl guanosine phosphorothioate
  modified_base 18: mod_base = OTHER; note = 2'-fluoro cytosine phosphorothioate
  modified_base 19: mod_base = OTHER; note = 2'-O-methyl cytosine phosphorothioate
  modified_base 20: mod_base = OTHER; note = 2'-fluoro adenosine
ttgcagcggctcctcagcca

SEQ ID NO: 285 - RNA, 20 nt, synthetic construct
  source 1..20: mol_type = other RNA
  modified_base 1: mod_base = OTHER; note = 5' phosphate 2'-O-methyl uridine phosphorothioate
  modified_base 2: mod_base = OTHER; note = 2'-fluoro uridine phosphorothioate
  modified_base 3: mod_base = OTHER; note = 2'-O-methyl cytosine
  modified_base 4: mod_base = OTHER; note = 2'-fluoro guanosine
  modified_base 5: mod_base = OTHER; note = 2'-O-methyl guanosine
  modified_base 6: mod_base = OTHER; note = 2'-fluoro uridine
  modified_base 7: mod_base = OTHER; note = 2'-O-methyl guanosine
  modified_base 8: mod_base = OTHER; note = 2'-fluoro cytosine
  modified_base 9: mod_base = OTHER; note = 2'-O-methyl adenosine
  modified_base 10: mod_base = OTHER; note = 2'-fluoro guanosine
  modified_base 11: mod_base = OTHER; note = 2'-O-methyl cytosine
  modified_base 12: mod_base = OTHER; note = 2'-fluoro guanosine
  modified_base 13: mod_base = OTHER; note = 2'-O-methyl guanosine phosphorothioate
  modified_base 14: mod_base = OTHER; note = 2'-fluoro cytosine phosphorothioate
  modified_base 15: mod_base = OTHER; note = 2'-O-methyl uridine phosphorothioate
  modified_base 16: mod_base = OTHER; note = 2'-fluoro cytosine phosphorothioate
  modified_base 17: mod_base = OTHER; note = 2'-O-methyl cytosine phosphorothioate
  modified_base 18: mod_base = OTHER; note = 2'-fluoro uridine phosphorothioate
  modified_base 19: mod_base = OTHER; note = 2'-O-methyl cytosine phosphorothioate
  modified_base 20: mod_base = OTHER; note = 2'-fluoro adenosine
ttcggtgcagcggctcctca

SEQ ID NO: 286 - RNA, 20 nt, synthetic construct
  source 1..20: mol_type = other RNA
  modified_base 1: mod_base = OTHER; note = 5' phosphate 2'-O-methyl uridine phosphorothioate
  modified_base 2: mod_base = OTHER; note = 2'-fluoro uridine phosphorothioate
  modified_base 3: mod_base = OTHER; note = 2'-O-methyl guanosine
  modified_base 4: mod_base = OTHER; note = 2'-fluoro guanosine
  modified_base 5: mod_base = OTHER; note = 2'-O-methyl uridine
  modified_base 6: mod_base = OTHER; note = 2'-fluoro cytosine
  modified_base 7: mod_base = OTHER; note = 2'-O-methyl guanosine
  modified_base 8: mod_base = OTHER; note = 2'-fluoro guanosine
  modified_base 9: mod_base = OTHER; note = 2'-O-methyl uridine
  modified_base 10: mod_base = OTHER; note = 2'-fluoro guanosine
  modified_base 11: mod_base = OTHER; note = 2'-O-methyl cytosine
  modified_base 12: mod_base = OTHER; note = 2'-fluoro adenosine
  modified_base 13: mod_base = OTHER; note = 2'-O-methyl guanosine phosphorothioate
  modified_base 14: mod_base = OTHER; note = 2'-fluoro cytosine phosphorothioate
  modified_base 15: mod_base = OTHER; note = 2'-O-methyl guanosine phosphorothioate
  modified_base 16: mod_base = OTHER; note = 2'-fluoro guanosine phosphorothioate
  modified_base 17: mod_base = OTHER; note = 2'-O-methyl cytosine phosphorothioate
  modified_base 18: mod_base = OTHER; note = 2'-fluoro uridine phosphorothioate
  modified_base 19: mod_base = OTHER; note = 2'-O-methyl cytosine phosphorothioate
  modified_base 20: mod_base = OTHER; note = 2'-fluoro cytosine
ttggtcggtgcagcggctcc

SEQ ID NO: 287 - RNA, 15 nt, synthetic construct
  source 1..15: mol_type = other RNA
  modified_base 1: mod_base = OTHER; note = 2'-fluoro guanosine phosphorothioate
  modified_base 2: mod_base = OTHER; note = 2'-O-methyl adenosine phosphorothioate
  modified_base 3: mod_base = OTHER; note = 2'-fluoro cytosine
  modified_base 4: mod_base = OTHER; note = 2'-O-methyl cytosine
  modified_base 5: mod_base = OTHER; note = 2'-fluoro cytosine
  modified_base 6: mod_base = OTHER; note = 2'-O-methyl uridine
  modified_base 7: mod_base = OTHER; note = 2'-fluoro guanosine
  modified_base 8: mod_base = OTHER; note = 2'-O-methyl guanosine
  modified_base 9: mod_base = OTHER; note = 2'-fluoro adenosine
  modified_base 10: mod_base = OTHER; note = 2'-O-methyl adenosine
  modified_base 11: mod_base = OTHER; note = 2'-fluoro adenosine
  modified_base 12: mod_base = OTHER; note = 2'-O-methyl adenosine
  modified_base 13: mod_base = OTHER; note = 2'-fluoro guanosine phosphorothioate
  modified_base 14: mod_base = OTHER; note = 2'-O-methyl cytosine phosphorothioate
  modified_base 15: mod_base = OTHER; note = 2'-fluoro adenosine triethylene glycol
gaccctggaaaagca

SEQ ID NO: 288 - RNA, 15 nt, synthetic construct
  source 1..15: mol_type = other RNA
  modified_base 1: mod_base = OTHER; note = 2'-fluoro cytosine phosphorothioate
  modified_base 2: mod_base = OTHER; note = 2'-O-methyl cytosine phosphorothioate
  modified_base 3: mod_base = OTHER; note = 2'-fluoro cytosine
  modified_base 4: mod_base = OTHER; note = 2'-O-methyl uridine
  modified_base 5: mod_base = OTHER; note = 2'-fluoro guanosine
  modified_base 6: mod_base = OTHER; note = 2'-O-methyl guanosine
  modified_base 7: mod_base = OTHER; note = 2'-fluoro adenosine
  modified_base 8: mod_base = OTHER; note = 2'-O-methyl adenosine
  modified_base 9: mod_base = OTHER; note = 2'-fluoro adenosine
  modified_base 10: mod_base = OTHER; note = 2'-O-methyl adenosine
  modified_base 11: mod_base = OTHER; note = 2'-fluoro guanosine
  modified_base 12: mod_base = OTHER; note = 2'-O-methyl cytosine
  modified_base 13: mod_base = OTHER; note = 2'-fluoro uridine phosphorothioate
  modified_base 14: mod_base = OTHER; note = 2'-O-methyl guanosine phosphorothioate
  modified_base 15: mod_base = OTHER; note = 2'-fluoro adenosine triethylene glycol
ccctggaaaagctga

SEQ ID NO: 289 - RNA, 15 nt, synthetic construct
  source 1..15: mol_type = other RNA
  modified_base 1: mod_base = OTHER; note = 2'-fluoro cytosine phosphorothioate
  modified_base 2: mod_base = OTHER; note = 2'-O-methyl uridine phosphorothioate
  modified_base 3: mod_base = OTHER; note = 2'-fluoro guanosine
  modified_base 4: mod_base = OTHER; note = 2'-O-methyl guanosine
  modified_base 5: mod_base = OTHER; note = 2'-fluoro adenosine
  modified_base 6: mod_base = OTHER; note = 2'-O-methyl adenosine
  modified_base 7: mod_base = OTHER; note = 2'-fluoro adenosine
  modified_base 8: mod_base = OTHER; note = 2'-O-methyl adenosine
  modified_base 9: mod_base = OTHER; note = 2'-fluoro guanosine
  modified_base 10: mod_base = OTHER; note = 2'-O-methyl cytosine
  modified_base 11: mod_base = OTHER; note = 2'-fluoro uridine
  modified_base 12: mod_base = OTHER; note = 2'-O-methyl guanosine
  modified_base 13: mod_base = OTHER; note = 2'-fluoro adenosine phosphorothioate
  modified_base 14: mod_base = OTHER; note = 2'-O-methyl uridine phosphorothioate
  modified_base 15: mod_base = OTHER; note = 2'-fluoro adenosine triethylene glycol
ctggaaaagctgata

SEQ ID NO: 290 - RNA, 15 nt, synthetic construct
  source 1..15: mol_type = other RNA
  modified_base 1: mod_base = OTHER; note = 2'-fluoro guanosine phosphorothioate
  modified_base 2: mod_base = OTHER; note = 2'-O-methyl adenosine phosphorothioate
  modified_base 3: mod_base = OTHER; note = 2'-fluoro adenosine
  modified_base 4: mod_base = OTHER; note = 2'-O-methyl adenosine
  modified_base 5: mod_base = OTHER; note = 2'-fluoro adenosine
  modified_base 6: mod_base = OTHER; note = 2'-O-methyl guanosine
  modified_base 7: mod_base = OTHER; note = 2'-fluoro cytosine
  modified_base 8: mod_base = OTHER; note = 2'-O-methyl uridine
  modified_base 9: mod_base = OTHER; note = 2'-fluoro guanosine
  modified_base 10: mod_base = OTHER; note = 2'-O-methyl adenosine
  modified_base 11: mod_base = OTHER; note = 2'-fluoro uridine
  modified_base 12: mod_base = OTHER; note = 2'-O-methyl guanosine
  modified_base 13: mod_base = OTHER; note = 2'-fluoro adenosine phosphorothioate
  modified_base 14: mod_base = OTHER; note = 2'-O-methyl adenosine phosphorothioate
  modified_base 15: mod_base = OTHER; note = 2'-fluoro adenosine triethylene glycol
gaaaagctgatgaaa

SEQ ID NO: 291 - RNA, 15 nt, synthetic construct
  source 1..15: mol_type = other RNA
  modified_base 1: mod_base = OTHER; note = 2'-fluoro adenosine phosphorothioate
  modified_base 2: mod_base = OTHER; note = 2'-O-methyl adenosine phosphorothioate
  modified_base 3: mod_base = OTHER; note = 2'-fluoro adenosine
  modified_base 4: mod_base = OTHER; note = 2'-O-methyl guanosine
  modified_base 5: mod_base = OTHER; note = 2'-fluoro cytosine
  modified_base 6: mod_base = OTHER; note = 2'-O-methyl uridine
  modified_base 7: mod_base = OTHER; note = 2'-fluoro guanosine
  modified_base 8: mod_base = OTHER; note = 2'-O-methyl adenosine
  modified_base 9: mod_base = OTHER; note = 2'-fluoro uridine
  modified_base 10: mod_base = OTHER; note = 2'-O-methyl guanosine
  modified_base 11: mod_base = OTHER; note = 2'-fluoro adenosine
  modified_base 12: mod_base = OTHER; note = 2'-O-methyl adenosine
  modified_base 13: mod_base = OTHER; note = 2'-fluoro guanosine phosphorothioate
  modified_base 14: mod_base = OTHER; note = 2'-O-methyl guanosine phosphorothioate
  modified_base 15: mod_base = OTHER; note = 2'-fluoro adenosine triethylene glycol
aaagctgatgaagga

SEQ ID NO: 292 - RNA, 15 nt, synthetic construct
  source 1..15: mol_type = other RNA
  modified_base 1: mod_base = OTHER; note = 2'-fluoro adenosine phosphorothioate
  modified_base 2: mod_base = OTHER; note = 2'-O-methyl guanosine phosphorothioate
  modified_base 3: mod_base = OTHER; note = 2'-fluoro cytosine
  modified_base 4: mod_base = OTHER; note = 2'-O-methyl uridine
  modified_base 5: mod_base = OTHER; note = 2'-fluoro guanosine
  modified_base 6: mod_base = OTHER; note = 2'-O-methyl adenosine
  modified_base 7: mod_base = OTHER; note = 2'-fluoro uridine
  modified_base 8: mod_base = OTHER; note = 2'-O-methyl guanosine
  modified_base 9: mod_base = OTHER; note = 2'-fluoro adenosine
  modified_base 10: mod_base = OTHER; note = 2'-O-methyl adenosine
  modified_base 11: mod_base = OTHER; note = 2'-fluoro guanosine
  modified_base 12: mod_base = OTHER; note = 2'-O-methyl guanosine
  modified_base 13: mod_base = OTHER; note = 2'-fluoro cytosine phosphorothioate
  modified_base 14: mod_base = OTHER; note = 2'-O-methyl cytosine phosphorothioate
  modified_base 15: mod_base = OTHER; note = 2'-fluoro adenosine triethylene glycol
agctgatgaaggcca

SEQ ID NO: 293 - RNA, 15 nt, synthetic construct
  source 1..15: mol_type = other RNA
  modified_base 1: mod_base = OTHER; note = 2'-fluoro uridine phosphorothioate
  modified_base 2: mod_base = OTHER; note = 2'-O-methyl guanosine phosphorothioate
  modified_base 3: mod_base = OTHER; note = 2'-fluoro adenosine
  modified_base 4: mod_base = OTHER; note = 2'-O-methyl adenosine
  modified_base 5: mod_base = OTHER; note = 2'-fluoro guanosine
  modified_base 6: mod_base = OTHER; note = 2'-O-methyl guanosine
  modified_base 7: mod_base = OTHER; note = 2'-fluoro cytosine
  modified_base 8: mod_base = OTHER; note = 2'-O-methyl cytosine
  modified_base 9: mod_base = OTHER; note = 2'-fluoro uridine
  modified_base 10: mod_base = OTHER; note = 2'-O-methyl uridine
  modified_base 11: mod_base = OTHER; note = 2'-fluoro cytosine
  modified_base 12: mod_base = OTHER; note = 2'-O-methyl guanosine
  modified_base 13: mod_base = OTHER; note = 2'-fluoro adenosine phosphorothioate
  modified_base 14: mod_base = OTHER; note = 2'-O-methyl guanosine phosphorothioate
  modified_base 15: mod_base = OTHER; note = 2'-fluoro adenosine triethylene glycol
tgaaggccttcgaga

SEQ ID NO: 294 - RNA, 15 nt, synthetic construct
  source 1..15: mol_type = other RNA
  modified_base 1: mod_base = OTHER; note = 2'-fluoro adenosine phosphorothioate
  modified_base 2: mod_base = OTHER; note = 2'-O-methyl adenosine phosphorothioate
  modified_base 3: mod_base = OTHER; note = 2'-fluoro guanosine
  modified_base 4: mod_base = OTHER; note = 2'-O-methyl guanosine
  modified_base 5: mod_base = OTHER; note = 2'-fluoro cytosine
  modified_base 6: mod_base = OTHER; note = 2'-O-methyl cytosine
  modified_base 7: mod_base = OTHER; note = 2'-fluoro uridine
  modified_base 8: mod_base = OTHER; note = 2'-O-methyl uridine
  modified_base 9: mod_base = OTHER; note = 2'-fluoro cytosine
  modified_base 10: mod_base = OTHER; note = 2'-O-methyl guanosine
  modified_base 11: mod_base = OTHER; note = 2'-fluoro adenosine
  modified_base 12: mod_base = OTHER; note = 2'-O-methyl guanosine
  modified_base 13: mod_base = OTHER; note = 2'-fluoro uridine phosphorothioate
  modified_base 14: mod_base = OTHER; note = 2'-O-methyl cytosine phosphorothioate
  modified_base 15: mod_base = OTHER; note = 2'-fluoro adenosine triethylene glycol
aaggccttcgagtca

SEQ ID NO: 295 - RNA, 15 nt, synthetic construct
  source 1..15: mol_type = other RNA
  modified_base 1: mod_base = OTHER; note = 2'-fluoro uridine phosphorothioate
  modified_base 2: mod_base = OTHER; note = 2'-O-methyl uridine phosphorothioate
  modified_base 3: mod_base = OTHER; note = 2'-fluoro cytosine
  modified_base 4: mod_base = OTHER; note = 2'-O-methyl guanosine
  modified_base 5: mod_base = OTHER; note = 2'-fluoro adenosine
  modified_base 6: mod_base = OTHER; note = 2'-O-methyl guanosine
  modified_base 7: mod_base = OTHER; note = 2'-fluoro uridine
  modified_base 8: mod_base = OTHER; note = 2'-O-methyl cytosine
  modified_base 9: mod_base = OTHER; note = 2'-fluoro cytosine
  modified_base 10: mod_base = OTHER; note = 2'-O-methyl cytosine
  modified_base 11: mod_base = OTHER; note = 2'-fluoro uridine
  modified_base 12: mod_base = OTHER; note = 2'-O-methyl cytosine
  modified_base 13: mod_base = OTHER; note = 2'-fluoro adenosine phosphorothioate
  modified_base 14: mod_base = OTHER; note = 2'-O-methyl adenosine phosphorothioate
  modified_base 15: mod_base = OTHER; note = 2'-fluoro adenosine triethylene glycol
ttcgagtccctcaaa

SEQ ID NO: 296 - RNA, 15 nt, synthetic construct
  source 1..15: mol_type = other RNA
  modified_base 1: mod_base = OTHER; note = 2'-fluoro cytosine phosphorothioate
  modified_base 2: mod_base = OTHER; note = 2'-O-methyl guanosine phosphorothioate
  modified_base 3: mod_base = OTHER; note = 2'-fluoro adenosine
  modified_base 4: mod_base = OTHER; note = 2'-O-methyl guanosine
  modified_base 5: mod_base = OTHER; note = 2'-fluoro uridine
  modified_base 6: mod_base = OTHER; note = 2'-O-methyl cytosine
  modified_base 7: mod_base = OTHER; note = 2'-fluoro cytosine
  modified_base 8: mod_base = OTHER; note = 2'-O-methyl cytosine
  modified_base 9: mod_base = OTHER; note = 2'-fluoro uridine
  modified_base 10: mod_base = OTHER; note = 2'-O-methyl cytosine
  modified_base 11: mod_base = OTHER; note = 2'-fluoro adenosine
  modified_base 12: mod_base = OTHER; note = 2'-O-methyl adenosine
  modified_base 13: mod_base = OTHER; note = 2'-fluoro guanosine phosphorothioate
  modified_base 14: mod_base = OTHER; note = 2'-O-methyl uridine phosphorothioate
  modified_base 15: mod_base = OTHER; note = 2'-fluoro adenosine triethylene glycol
cgagtccctcaagta

SEQ ID NO: 297 - RNA, 15 nt, synthetic construct
  source 1..15: mol_type = other RNA
  modified_base 1: mod_base = OTHER; note = 2'-fluoro adenosine phosphorothioate
  modified_base 2: mod_base = OTHER; note = 2'-O-methyl guanosine phosphorothioate
  modified_base 3: mod_base = OTHER; note = 2'-fluoro uridine
  modified_base 4: mod_base = OTHER; note = 2'-O-methyl cytosine
  modified_base 5: mod_base = OTHER; note = 2'-fluoro cytosine
  modified_base 6: mod_base = OTHER; note = 2'-O-methyl cytosine
  modified_base 7: mod_base = OTHER; note = 2'-fluoro uridine
  modified_base 8: mod_base = OTHER; note = 2'-O-methyl cytosine
  modified_base 9: mod_base = OTHER; note = 2'-fluoro adenosine
  modified_base 10: mod_base = OTHER; note = 2'-O-methyl adenosine
  modified_base 11: mod_base = OTHER; note = 2'-fluoro guanosine
  modified_base 12: mod_base = OTHER; note = 2'-O-methyl uridine
  modified_base 13: mod_base = OTHER; note = 2'-fluoro cytosine phosphorothioate
  modified_base 14: mod_base = OTHER; note = 2'-O-methyl cytosine phosphorothioate
  modified_base 15: mod_base = OTHER; note = 2'-fluoro adenosine triethylene glycol
agtccctcaagtcca

SEQ ID NO: 298 - RNA, 15 nt, synthetic construct
  source 1..15: mol_type = other RNA
  modified_base 1: mod_base = OTHER; note = 2'-fluoro uridine phosphorothioate
  modified_base 2: mod_base = OTHER; note = 2'-O-methyl cytosine phosphorothioate
  modified_base 3: mod_base = OTHER; note = 2'-fluoro cytosine
  modified_base 4: mod_base = OTHER; note = 2'-O-methyl cytosine
  modified_base 5: mod_base = OTHER; note = 2'-fluoro uridine
  modified_base 6: mod_base = OTHER; note = 2'-O-methyl cytosine
  modified_base 7: mod_base = OTHER; note = 2'-fluoro adenosine
  modified_base 8: mod_base = OTHER; note = 2'-O-methyl adenosine
  modified_base 9: mod_base = OTHER; note = 2'-fluoro guanosine
  modified_base 10: mod_base = OTHER; note = 2'-O-methyl uridine
  modified_base 11: mod_base = OTHER; note = 2'-fluoro cytosine
  modified_base 12: mod_base = OTHER; note = 2'-O-methyl cytosine
  modified_base 13: mod_base = OTHER; note = 2'-fluoro uridine phosphorothioate
  modified_base 14: mod_base = OTHER; note = 2'-O-methyl uridine phosphorothioate
  modified_base 15: mod_base = OTHER; note = 2'-fluoro adenosine triethylene glycol
tccctcaagtcctta

SEQ ID NO: 299 - RNA, 15 nt, synthetic construct
  source 1..15: mol_type = other RNA
  modified_base 1: mod_base = OTHER; note = 2'-fluoro cytosine phosphorothioate
  modified_base 2: mod_base = OTHER; note = 2'-O-methyl cytosine phosphorothioate
  modified_base 3: mod_base = OTHER; note = 2'-fluoro uridine
  modified_base 4: mod_base = OTHER; note = 2'-O-methyl cytosine
  modified_base 5: mod_base = OTHER; note = 2'-fluoro adenosine
  modified_base 6: mod_base = OTHER; note = 2'-O-methyl adenosine
  modified_base 7: mod_base = OTHER; note = 2'-fluoro guanosine
  modified_base 8: mod_base = OTHER; note = 2'-O-methyl uridine
  modified_base 9: mod_base = OTHER; note = 2'-fluoro cytosine
  modified_base 10: mod_base = OTHER; note = 2'-O-methyl cytosine
  modified_base 11: mod_base = OTHER; note = 2'-fluoro uridine
  modified_base 12: mod_base = OTHER; note = 2'-O-methyl uridine
  modified_base 13: mod_base = OTHER; note = 2'-fluoro cytosine phosphorothioate
  modified_base 14: mod_base = OTHER; note = 2'-O-methyl cytosine phosphorothioate
  modified_base 15: mod_base = OTHER; note = 2'-fluoro adenosine triethylene glycol
cctcaagtccttcca

SEQ ID NO: 300 - RNA, 15 nt, synthetic construct
  source 1..15: mol_type = other RNA
  modified_base 1: mod_base = OTHER; note = 2'-fluoro cytosine phosphorothioate
  modified_base 2: mod_base = OTHER; note = 2'-O-methyl adenosine phosphorothioate
  modified_base 3: mod_base = OTHER; note = 2'-fluoro adenosine
  modified_base 4: mod_base = OTHER; note = 2'-O-methyl guanosine
  modified_base 5: mod_base = OTHER; note = 2'-fluoro uridine
  modified_base 6: mod_base = OTHER; note = 2'-O-methyl cytosine
  modified_base 7: mod_base = OTHER; note = 2'-fluoro cytosine
  modified_base 8: mod_base = OTHER; note = 2'-O-methyl uridine
  modified_base 9: mod_base = OTHER; note = 2'-fluoro uridine
  modified_base 10: mod_base = OTHER; note = 2'-O-methyl cytosine
  modified_base 11: mod_base = OTHER; note = 2'-fluoro cytosine
  modified_base 12: mod_base = OTHER; note = 2'-O-methyl adenosine
  modified_base 13: mod_base = OTHER; note = 2'-fluoro guanosine phosphorothioate
  modified_base 14: mod_base = OTHER; note = 2'-O-methyl cytosine phosphorothioate
  modified_base 15: mod_base = OTHER; note = 2'-fluoro adenosine triethylene glycol
caagtccttccagca

SEQ ID NO: 301 - RNA, 15 nt, synthetic construct
  source 1..15: mol_type = other RNA
  modified_base 1: mod_base = OTHER; note = 2'-fluoro cytosine phosphorothioate
  modified_base 2: mod_base = OTHER; note = 2'-O-methyl adenosine phosphorothioate
  modified_base 3: mod_base = OTHER; note = 2'-fluoro guanosine
  modified_base 4: mod_base = OTHER; note = 2'-O-methyl cytosine
  modified_base 5: mod_base = OTHER; note = 2'-fluoro adenosine
  modified_base 6: mod_base = OTHER; note = 2'-O-methyl adenosine
  modified_base 7: mod_base = OTHER; note = 2'-fluoro cytosine
  modified_base 8: mod_base = OTHER; note = 2'-O-methyl adenosine
  modified_base 9: mod_base = OTHER; note = 2'-fluoro guanosine
  modified_base 10: mod_base = OTHER; note = 2'-O-methyl cytosine
  modified_base 11: mod_base = OTHER; note = 2'-fluoro cytosine
  modified_base 12: mod_base = OTHER; note = 2'-O-methyl guanosine
  modified_base 13: mod_base = OTHER; note = 2'-fluoro cytosine phosphorothioate
  modified_base 14: mod_base = OTHER; note = 2'-O-methyl cytosine phosphorothioate
  modified_base 15: mod_base = OTHER; note = 2'-fluoro adenosine triethylene glycol
cagcaacagccgcca

SEQ ID NO: 302 - RNA, 15 nt, synthetic construct
  source 1..15: mol_type = other RNA
  modified_base 1: mod_base = OTHER; note = 2'-fluoro cytosine phosphorothioate
  modified_base 2: mod_base = OTHER; note = 2'-O-methyl adenosine phosphorothioate
  modified_base 3: mod_base = OTHER; note = 2'-fluoro adenosine
  modified_base 4: mod_base = OTHER; note = 2'-O-methyl cytosine
  modified_base 5: mod_base = OTHER; note = 2'-fluoro adenosine
  modified_base 6: mod_base = OTHER; note = 2'-O-methyl guanosine
  modified_base 7: mod_base = OTHER; note = 2'-fluoro cytosine
  modified_base 8: mod_base = OTHER; note = 2'-O-methyl cytosine
  modified_base 9: mod_base = OTHER; note = 2'-fluoro guanosine
  modified_base 10: mod_base = OTHER; note = 2'-O-methyl cytosine
  modified_base 11: mod_base = OTHER; note = 2'-fluoro cytosine
  modified_base 12: mod_base = OTHER; note = 2'-O-methyl adenosine
  modified_base 13: mod_base = OTHER; note = 2'-fluoro cytosine phosphorothioate
  modified_base 14: mod_base = OTHER; note = 2'-O-methyl cytosine phosphorothioate
  modified_base 15: mod_base = OTHER; note = 2'-fluoro adenosine triethylene glycol
caacagccgccacca

SEQ ID NO: 303 - RNA, 15 nt, synthetic construct
  source 1..15: mol_type = other RNA
  modified_base 1: mod_base = OTHER; note = 2'-fluoro cytosine phosphorothioate
  modified_base 2: mod_base = OTHER; note = 2'-O-methyl cytosine phosphorothioate
  modified_base 3: mod_base = OTHER; note = 2'-fluoro uridine
  modified_base 4: mod_base = OTHER; note = 2'-O-methyl cytosine
  modified_base 5: mod_base = OTHER; note = 2'-fluoro adenosine
  modified_base 6: mod_base = OTHER; note = 2'-O-methyl guanosine
  modified_base 7: mod_base = OTHER; note = 2'-fluoro cytosine
  modified_base 8: mod_base = OTHER; note = 2'-O-methyl uridine
  modified_base 9: mod_base = OTHER; note = 2'-fluoro uridine
  modified_base 10: mod_base = OTHER; note = 2'-O-methyl cytosine
  modified_base 11: mod_base = OTHER; note = 2'-fluoro cytosine
  modified_base 12: mod_base = OTHER; note = 2'-O-methyl uridine
  modified_base 13: mod_base = OTHER; note = 2'-fluoro cytosine phosphorothioate
  modified_base 14: mod_base = OTHER; note = 2'-O-methyl adenosine phosphorothioate
  modified_base 15: mod_base = OTHER; note = 2'-fluoro adenosine triethylene glycol
cctcagcttcctcaa

SEQ ID NO: 304 - RNA, 15 nt, synthetic construct
  source 1..15: mol_type = other RNA
  modified_base 1: mod_base = OTHER; note = 2'-fluoro uridine phosphorothioate
  modified_base 2: mod_base = OTHER; note = 2'-O-methyl cytosine phosphorothioate
  modified_base 3: mod_base = OTHER; note = 2'-fluoro adenosine
  modified_base 4: mod_base = OTHER; note = 2'-O-methyl guanosine
  modified_base 5: mod_base = OTHER; note = 2'-fluoro cytosine
  modified_base 6: mod_base = OTHER; note = 2'-O-methyl uridine
  modified_base 7: mod_base = OTHER; note = 2'-fluoro uridine
  modified_base 8: mod_base = OTHER; note = 2'-O-methyl cytosine
  modified_base 9: mod_base = OTHER; note = 2'-fluoro cytosine
  modified_base 10: mod_base = OTHER; note = 2'-O-methyl uridine
  modified_base 11: mod_base = OTHER; note = 2'-fluoro cytosine
  modified_base 12: mod_base = OTHER; note = 2'-O-methyl adenosine
  modified_base 13: mod_base = OTHER; note = 2'-fluoro guanosine phosphorothioate
  modified_base 14: mod_base = OTHER; note = 2'-O-methyl cytosine phosphorothioate
  modified_base 15: mod_base = OTHER; note = 2'-fluoro adenosine triethylene glycol
tcagcttcctcagca

SEQ ID NO: 305 - RNA, 15 nt, synthetic construct
  source 1..15: mol_type = other RNA
  modified_base 1: mod_base = OTHER; note = 2'-fluoro adenosine phosphorothioate
  modified_base 2: mod_base = OTHER; note = 2'-O-methyl guanosine phosphorothioate
  modified_base 3: mod_base = OTHER; note = 2'-fluoro cytosine
  modified_base 4: mod_base = OTHER; note = 2'-O-methyl uridine
  modified_base 5: mod_base = OTHER; note = 2'-fluoro uridine
  modified_base 6: mod_base = OTHER; note = 2'-O-methyl cytosine
  modified_base 7: mod_base = OTHER; note = 2'-fluoro cytosine
  modified_base 8: mod_base = OTHER; note = 2'-O-methyl uridine
  modified_base 9: mod_base = OTHER; note = 2'-fluoro cytosine
  modified_base 10: mod_base = OTHER; note = 2'-O-methyl adenosine
  modified_base 11: mod_base = OTHER; note = 2'-fluoro guanosine
  modified_base 12: mod_base = OTHER; note = 2'-O-methyl cytosine
  modified_base 13: mod_base = OTHER; note = 2'-fluoro cytosine phosphorothioate
  modified_base 14: mod_base = OTHER; note = 2'-O-methyl guanosine phosphorothioate
  modified_base 15: mod_base = OTHER; note = 2'-fluoro adenosine triethylene glycol
agcttcctcagccga

SEQ ID NO: 306 - RNA, 15 nt, synthetic construct
  source 1..15: mol_type = other RNA
  modified_base 1: mod_base = OTHER; note = 2'-fluoro guanosine phosphorothioate
  modified_base 2: mod_base = OTHER; note = 2'-O-methyl cytosine phosphorothioate
  modified_base 3: mod_base = OTHER; note = 2'-fluoro cytosine
  modified_base 4: mod_base = OTHER; note = 2'-O-methyl guanosine
  modified_base 5: mod_base = OTHER; note = 2'-fluoro cytosine
  modified_base 6: mod_base = OTHER; note = 2'-O-methyl uridine
  modified_base 7: mod_base = OTHER; note = 2'-fluoro guanosine
  modified_base 8: mod_base = OTHER; note = 2'-O-methyl cytosine
  modified_base 9: mod_base = OTHER; note = 2'-fluoro uridine
  modified_base 10: mod_base = OTHER; note = 2'-O-methyl guanosine
  modified_base 11: mod_base = OTHER; note = 2'-fluoro cytosine
  modified_base 12: mod_base = OTHER; note = 2'-O-methyl cytosine
  modified_base 13: mod_base = OTHER; note = 2'-fluoro uridine phosphorothioate
  modified_base 14: mod_base = OTHER; note = 2'-O-methyl cytosine phosphorothioate
  modified_base 15: mod_base = OTHER; note = 2'-fluoro adenosine triethylene glycol
gccgctgctgcctca

SEQ ID NO: 307 - RNA, 15 nt, synthetic construct
  source 1..15: mol_type = other RNA
  modified_base 1: mod_base = OTHER; note = 2'-fluoro guanosine phosphorothioate
  modified_base 2: mod_base = OTHER; note = 2'-O-methyl guanosine phosphorothioate
  modified_base 3: mod_base = OTHER; note = 2'-fluoro cytosine
  modified_base 4: mod_base = OTHER; note = 2'-O-methyl uridine
  modified_base 5: mod_base = OTHER; note = 2'-fluoro guanosine
  modified_base 6: mod_base = OTHER; note = 2'-O-methyl adenosine
  modified_base 7: mod_base = OTHER; note = 2'-fluoro guanosine
  modified_base 8: mod_base = OTHER; note = 2'-O-methyl guanosine
  modified_base 9: mod_base = OTHER; note = 2'-fluoro adenosine
  modified_base 10: mod_base = OTHER; note = 2'-O-methyl guanosine
  modified_base 11: mod_base = OTHER; note = 2'-fluoro cytosine
  modified_base 12: mod_base = OTHER; note = 2'-O-methyl cytosine
  modified_base 13: mod_base = OTHER; note = 2'-fluoro guanosine phosphorothioate
  modified_base 14: mod_base = OTHER; note = 2'-O-methyl cytosine phosphorothioate
  modified_base 15: mod_base = OTHER; note = 2'-fluoro adenosine triethylene glycol
ggctgaggagccgca

SEQ ID NO: 308 - RNA, 15 nt, synthetic construct
  source 1..15: mol_type = other RNA
  modified_base 1: mod_base = OTHER; note = 2'-fluoro guanosine phosphorothioate
  modified_base 2: mod_base = OTHER; note = 2'-O-methyl adenosine phosphorothioate
  modified_base 3: mod_base = OTHER; note = 2'-fluoro guanosine
  modified_base 4: mod_base = OTHER; note = 2'-O-methyl guanosine
  modified_base 5: mod_base = OTHER; note = 2'-fluoro adenosine
  modified_base 6: mod_base = OTHER; note = 2'-O-methyl guanosine
  modified_base 7: mod_base = OTHER; note = 2'-fluoro cytosine
  modified_base 8: mod_base = OTHER; note = 2'-O-methyl cytosine
  modified_base 9: mod_base = OTHER; note = 2'-fluoro guanosine
  modified_base 10: mod_base = OTHER; note = 2'-O-methyl cytosine
  modified_base 11: mod_base = OTHER; note = 2'-fluoro uridine
  modified_base 12: mod_base = OTHER; note = 2'-O-methyl guanosine
  modified_base 13: mod_base = OTHER; note = 2'-fluoro cytosine phosphorothioate
  modified_base 14: mod_base = OTHER; note = 2'-O-methyl adenosine phosphorothioate
  modified_base 15: mod_base = OTHER; note = 2'-fluoro adenosine triethylene glycol
gaggagccgctgcaa

SEQ ID NO: 309 - RNA, 15 nt, synthetic construct
  source 1..15: mol_type = other RNA
  modified_base 1: mod_base = OTHER; note = 2'-fluoro adenosine phosphorothioate
  modified_base 2: mod_base = OTHER; note = 2'-O-methyl guanosine phosphorothioate
  modified_base 3: mod_base = OTHER; note = 2'-fluoro cytosine
  modified_base 4: mod_base = OTHER; note = 2'-O-methyl cytosine
  modified_base 5: mod_base = OTHER; note = 2'-fluoro guanosine
  modified_base 6: mod_base = OTHER; note = 2'-O-methyl cytosine
  modified_base 7: mod_base = OTHER; note = 2'-fluoro uridine
  modified_base 8: mod_base = OTHER; note = 2'-O-methyl guanosine
  modified_base 9: mod_base = OTHER; note = 2'-fluoro cytosine
  modified_base 10: mod_base = OTHER; note = 2'-O-methyl adenosine
  modified_base 11: mod_base = OTHER; note = 2'-fluoro cytosine
  modified_base 12: mod_base = OTHER; note = 2'-O-methyl cytosine
  modified_base 13: mod_base = OTHER; note = 2'-fluoro guanosine phosphorothioate
  modified_base 14: mod_base = OTHER; note = 2'-O-methyl adenosine phosphorothioate
  modified_base 15: mod_base = OTHER; note = 2'-fluoro adenosine triethylene glycol
agccgctgcaccgaa

SEQ ID NO: 310 - RNA, 15 nt, synthetic construct
  source 1..15: mol_type = other RNA
  modified_base 1: mod_base = OTHER; note = 2'-fluoro cytosine phosphorothioate
  modified_base 2: mod_base = OTHER; note = 2'-O-methyl guanosine phosphorothioate
  modified_base 3: mod_base = OTHER; note = 2'-fluoro cytosine
  modified_base 4: mod_base = OTHER; note = 2'-O-methyl uridine
  modified_base 5: mod_base = OTHER; note = 2'-fluoro guanosine
  modified_base 6: mod_base = OTHER; note = 2'-O-methyl cytosine
  modified_base 7: mod_base = OTHER; note = 2'-fluoro adenosine
  modified_base 8: mod_base = OTHER; note = 2'-O-methyl cytosine
  modified_base 9: mod_base = OTHER; note = 2'-fluoro cytosine
  modified_base 10: mod_base = OTHER; note = 2'-O-methyl guanosine
  modified_base 11: mod_base = OTHER; note = 2'-fluoro adenosine
  modified_base 12: mod_base = OTHER; note = 2'-O-methyl cytosine
  modified_base 13: mod_base = OTHER; note = 2'-fluoro cytosine phosphorothioate
  modified_base 14: mod_base = OTHER; note = 2'-O-methyl adenosine phosphorothioate
  modified_base 15: mod_base = OTHER; note = 2'-fluoro adenosine triethylene glycol
cgctgcaccgaccaa

SEQ ID NO: 311 - RNA, 20 nt, synthetic construct
  source 1..20: mol_type = other RNA
  modified_base 1: mod_base = OTHER; note = 5' phosphate 2'-O-methyl uridine phosphorothioate
  modified_base 2: mod_base = OTHER; note = 2'-fluoro uridine phosphorothioate
  modified_base 3: mod_base = OTHER; note = 2'-O-methyl uridine
  modified_base 4: mod_base = OTHER; note = 2'-fluoro adenosine
  modified_base 5: mod_base = OTHER; note = 2'-O-methyl cytosine
  modified_base 6: mod_base = OTHER; note = 2'-fluoro adenosine
  modified_base 7: mod_base = OTHER; note = 2'-O-methyl cytosine
  modified_base 8: mod_base = OTHER; note = 2'-fluoro guanosine
  modified_base 9: mod_base = OTHER; note = 2'-O-methyl guanosine
  modified_base 10: mod_base = OTHER; note = 2'-fluoro guanosine
  modified_base 11: mod_base = OTHER; note = 2'-O-methyl cytosine
  modified_base 12: mod_base = OTHER; note = 2'-fluoro adenosine
  modified_base 13: mod_base = OTHER; note = 2'-O-methyl uridine phosphorothioate
  modified_base 14: mod_base = OTHER; note = 2'-fluoro adenosine phosphorothioate
  modified_base 15: mod_base = OTHER; note = 2'-O-methyl guanosine phosphorothioate
  modified_base 16: mod_base = OTHER; note = 2'-fluoro adenosine phosphorothioate
  modified_base 17: mod_base = OTHER; note = 2'-O-methyl adenosine phosphorothioate
  modified_base 18: mod_base = OTHER; note = 2'-fluoro adenosine phosphorothioate
  modified_base 19: mod_base = OTHER; note = 2'-O-methyl guanosine phosphorothioate
  modified_base 20: mod_base = OTHER; note = 2'-fluoro adenosine
tttacacgggcatagaaaga

SEQ ID NO: 312 - RNA, 20 nt, synthetic construct
  source 1..20: mol_type = other RNA
  modified_base 1: mod_base = OTHER; note = 5' phosphate 2'-O-methyl uridine phosphorothioate
  modified_base 2: mod_base = OTHER; note = 2'-fluoro uridine phosphorothioate
  modified_base 3: mod_base = OTHER; note = 2'-O-methyl adenosine
  modified_base 4: mod_base = OTHER; note = 2'-fluoro cytosine
  modified_base 5: mod_base = OTHER; note = 2'-O-methyl uridine
  modified_base 6: mod_base = OTHER; note = 2'-fluoro uridine
  modified_base 7: mod_base = OTHER; note = 2'-O-methyl uridine
  modified_base 8: mod_base = OTHER; note = 2'-fluoro adenosine
  modified_base 9: mod_base = OTHER; note = 2'-O-methyl cytosine
  modified_base 10: mod_base = OTHER; note = 2'-fluoro adenosine
  modified_base 11: mod_base = OTHER; note = 2'-O-methyl cytosine
  modified_base 12: mod_base = OTHER; note = 2'-fluoro guanosine
  modified_base 13: mod_base = OTHER; note = 2'-O-methyl guanosine phosphorothioate
  modified_base 14: mod_base = OTHER; note = 2'-fluoro guanosine phosphorothioate
  modified_base 15: mod_base = OTHER; note = 2'-O-methyl cytosine phosphorothioate
  modified_base 16: mod_base = OTHER; note = 2'-fluoro adenosine phosphorothioate
  modified_base 17: mod_base = OTHER; note = 2'-O-methyl uridine phosphorothioate
  modified_base 18: mod_base = OTHER; note = 2'-fluoro adenosine phosphorothioate
  modified_base 19: mod_base = OTHER; note = 2'-O-methyl guanosine phosphorothioate
  modified_base 20: mod_base = OTHER; note = 2'-fluoro adenosine
ttactttacacgggcataga

SEQ ID NO: 313 - RNA, 20 nt, synthetic construct
  source 1..20: mol_type = other RNA
  modified_base 1: mod_base = OTHER; note = 5' phosphate 2'-O-methyl uridine phosphorothioate
  modified_base 2: mod_base = OTHER; note = 2'-fluoro guanosine phosphorothioate
  modified_base 3: mod_base = OTHER; note = 2'-O-methyl cytosine
  modified_base 4: mod_base = OTHER; note = 2'-fluoro adenosine
  modified_base 5: mod_base = OTHER; note = 2'-O-methyl cytosine
  modified_base 6: mod_base = OTHER; note = 2'-fluoro uridine
  modified_base 7: mod_base = OTHER; note = 2'-O-methyl cytosine
  modified_base 8: mod_base = OTHER; note = 2'-fluoro uridine
  modified_base 9: mod_base = OTHER; note = 2'-O-methyl cytosine
  modified_base 10: mod_base = OTHER; note = 2'-fluoro cytosine
  modified_base 11: mod_base = OTHER; note = 2'-O-methyl uridine
  modified_base 12: mod_base = OTHER; note = 2'-fluoro guanosine
  modified_base 13: mod_base = OTHER; note = 2'-O-methyl adenosine phosphorothioate
  modified_base 14: mod_base = OTHER; note = 2'-fluoro cytosine phosphorothioate
  modified_base 15: mod_base = OTHER; note = 2'-O-methyl uridine phosphorothioate
  modified_base 16: mod_base = OTHER; note = 2'-fluoro adenosine phosphorothioate
  modified_base 17: mod_base = OTHER; note = 2'-O-methyl adenosine phosphorothioate
  modified_base 18: mod_base = OTHER; note = 2'-fluoro adenosine phosphorothioate
  modified_base 19: mod_base = OTHER; note = 2'-O-methyl adenosine phosphorothioate
  modified_base 20: mod_base = OTHER; note = 2'-fluoro guanosine
tgcactctcctgactaaaag

SEQ ID NO: 314 - RNA, 20 nt, synthetic construct
  source 1..20: mol_type = other RNA
  modified_base 1: mod_base = OTHER; note = 5' phosphate 2'-O-methyl uridine phosphorothioate
  modified_base 2: mod_base = OTHER; note = 2'-fluoro adenosine phosphorothioate
  modified_base 3: mod_base = OTHER; note = 2'-O-methyl cytosine
  modified_base 4: mod_base = OTHER; note = 2'-fluoro adenosine
  modified_base 5: mod_base = OTHER; note = 2'-O-methyl uridine
  modified_base 6: mod_base = OTHER; note = 2'-fluoro uridine
  modified_base 7: mod_base = OTHER; note = 2'-O-methyl cytosine
  modified_base 8: mod_base = OTHER; note = 2'-fluoro adenosine
  modified_base 9: mod_base = OTHER; note = 2'-O-methyl adenosine
  modified_base 10: mod_base = OTHER; note = 2'-fluoro uridine
  modified_base 11: mod_base = OTHER; note = 2'-O-methyl adenosine
  modified_base 12: mod_base = OTHER; note = 2'-fluoro cytosine
  modified_base 13: mod_base = OTHER; note = 2'-O-methyl cytosine phosphorothioate
  modified_base 14: mod_base = OTHER; note = 2'-fluoro cytosine phosphorothioate
  modified_base 15: mod_base = OTHER; note = 2'-O-methyl adenosine phosphorothioate
  modified_base 16: mod_base = OTHER; note = 2'-fluoro adenosine phosphorothioate
  modified_base 17: mod_base = OTHER; note = 2'-O-methyl adenosine phosphorothioate
  modified_base 18: mod_base = OTHER; note = 2'-fluoro adenosine phosphorothioate
  modified_base 19: mod_base = OTHER; note = 2'-O-methyl cytosine phosphorothioate
  modified_base 20: mod_base = OTHER; note = 2'-fluoro adenosine
tacattcaatacccaaaaca

SEQ ID NO: 315 - RNA, 20 nt, synthetic construct
  source 1..20: mol_type = other RNA
  modified_base 1: mod_base = OTHER; note = 5' phosphate 2'-O-methyl uridine phosphorothioate
  modified_base 2: mod_base = OTHER; note = 2'-fluoro uridine phosphorothioate
  modified_base 3: mod_base = OTHER; note = 2'-O-methyl cytosine
  modified_base 4: mod_base = OTHER; note = 2'-fluoro cytosine
  modified_base 5: mod_base = OTHER; note = 2'-O-methyl uridine
  modified_base 6: mod_base = OTHER; note = 2'-fluoro cytosine
  modified_base 7: mod_base = OTHER; note = 2'-O-methyl cytosine
  modified_base 8: mod_base = OTHER; note = 2'-fluoro adenosine
  modified_base 9: mod_base = OTHER; note = 2'-O-methyl cytosine
  modified_base 10: mod_base = OTHER; note = 2'-fluoro uridine
  modified_base 11: mod_base = OTHER; note = 2'-O-methyl uridine
  modified_base 12: mod_base = OTHER; note = 2'-fluoro adenosine
  modified_base 13: mod_base = OTHER; note = 2'-O-methyl cytosine phosphorothioate
  modified_base 14: mod_base = OTHER; note = 2'-fluoro cytosine phosphorothioate
  modified_base 15: mod_base = OTHER; note = 2'-O-methyl adenosine phosphorothioate
  modified_base 16: mod_base = OTHER; note = 2'-fluoro cytosine phosphorothioate
  modified_base 17: mod_base = OTHER; note = 2'-O-methyl adenosine phosphorothioate
  modified_base 18: mod_base = OTHER; note = 2'-fluoro uridine phosphorothioate
  modified_base 19: mod_base = OTHER; note = 2'-O-methyl uridine phosphorothioate
  modified_base 20: mod_base = OTHER; note = 2'-fluoro cytosine
ttcctccacttaccacattc

SEQ ID NO: 316 - RNA, 20 nt, synthetic construct
  source 1..20: mol_type = other RNA
  modified_base 1: mod_base = OTHER; note = 5' phosphate 2'-O-methyl uridine phosphorothioate
  modified_base 2: mod_base = OTHER; note = 2'-fluoro adenosine phosphorothioate
  modified_base 3: mod_base = OTHER; note = 2'-O-methyl cytosine
  modified_base 4: mod_base = OTHER; note = 2'-fluoro adenosine
  modified_base 5: mod_base = OTHER; note = 2'-O-methyl uridine
  modified_base 6: mod_base = OTHER; note = 2'-fluoro uridine
  modified_base 7: mod_base = OTHER; note = 2'-O-methyl uridine
  modified_base 8: mod_base = OTHER; note = 2'-fluoro cytosine
  modified_base 9: mod_base = OTHER; note = 2'-O-methyl cytosine
  modified_base 10: mod_base = OTHER; note = 2'-fluoro uridine
  modified_base 11: mod_base = OTHER; note = 2'-O-methyl cytosine
  modified_base 12: mod_base = OTHER; note = 2'-fluoro cytosine
  modified_base 13: mod_base = OTHER; note = 2'-O-methyl adenosine phosphorothioate
  modified_base 14: mod_base = OTHER; note = 2'-fluoro cytosine phosphorothioate
  modified_base 15: mod_base = OTHER; note = 2'-O-methyl uridine phosphorothioate
  modified_base 16: mod_base = OTHER; note = 2'-fluoro uridine phosphorothioate
  modified_base 17: mod_base = OTHER; note = 2'-O-methyl adenosine phosphorothioate
  modified_base 18: mod_base = OTHER; note = 2'-fluoro cytosine phosphorothioate
  modified_base 19: mod_base = OTHER; note = 2'-O-methyl cytosine phosphorothioate
  modified_base 20: mod_base = OTHER; note = 2'-fluoro adenosine
tacatttcctccacttacca

SEQ ID NO: 317 - RNA, 20 nt, synthetic construct
  source 1..20: mol_type = other RNA
  modified_base 1: mod_base = OTHER; note = 5' phosphate 2'-O-methyl uridine phosphorothioate
  modified_base 2: mod_base = OTHER; note = 2'-fluoro guanosine phosphorothioate
  modified_base 3: mod_base = OTHER; note = 2'-O-methyl cytosine
  modified_base 4: mod_base = OTHER; note = 2'-fluoro adenosine
  modified_base 5: mod_base = OTHER; note = 2'-O-methyl cytosine
  modified_base 6: mod_base = OTHER; note = 2'-fluoro adenosine
  modified_base 7: mod_base = OTHER; note = 2'-O-methyl guanosine
  modified_base 8: mod_base = OTHER; note = 2'-fluoro adenosine
  modified_base 9: mod_base = OTHER; note = 2'-O-methyl guanosine
  modified_base 10: mod_base = OTHER; note = 2'-fluoro uridine
  modified_base 11: mod_base = OTHER; note = 2'-O-methyl uridine
  modified_base 12: mod_base = OTHER; note = 2'-fluoro cytosine
  modified_base 13: mod_base = OTHER; note = 2'-O-methyl cytosine phosphorothioate
  modified_base 14: mod_base = OTHER; note = 2'-fluoro adenosine phosphorothioate
  modified_base 15: mod_base = OTHER; note = 2'-O-methyl adenosine phosphorothioate
  modified_base 16: mod_base = OTHER; note = 2'-fluoro cytosine phosphorothioate
  modified_base 17: mod_base = OTHER; note = 2'-O-methyl adenosine phosphorothioate
  modified_base 18: mod_base = OTHER; note = 2'-fluoro uridine phosphorothioate
  modified_base 19: mod_base = OTHER; note = 2'-O-methyl uridine phosphorothioate
  modified_base 20: mod_base = OTHER; note = 2'-fluoro uridine
tgcacagagttccaacattt

SEQ ID NO: 318 - RNA, 20 nt, synthetic construct
  source 1..20: mol_type = other RNA
  modified_base 1: mod_base = OTHER; note = 5' phosphate 2'-O-methyl uridine phosphorothioate
  modified_base 2: mod_base = OTHER; note = 2'-fluoro uridine phosphorothioate
  modified_base 3: mod_base = OTHER; note = 2'-O-methyl adenosine
  modified_base 4: mod_base = OTHER; note = 2'-fluoro adenosine
  modified_base 5: mod_base = OTHER; note = 2'-O-methyl guanosine
  modified_base 6: mod_base = OTHER; note = 2'-fluoro guanosine
  modified_base 7: mod_base = OTHER; note = 2'-O-methyl guanosine
  modified_base 8: mod_base = OTHER; note = 2'-fluoro cytosine
  modified_base 9: mod_base = OTHER; note = 2'-O-methyl cytosine
  modified_base 10: mod_base = OTHER; note = 2'-fluoro uridine
  modified_base 11: mod_base = OTHER; note = 2'-O-methyl cytosine
  modified_base 12: mod_base = OTHER; note = 2'-fluoro cytosine
  modified_base 13: mod_base = OTHER; note = 2'-O-methyl uridine phosphorothioate
  modified_base 14: mod_base = OTHER; note = 2'-fluoro cytosine phosphorothioate
  modified_base 15: mod_base = OTHER; note = 2'-O-methyl adenosine phosphorothioate
  modified_base 16: mod_base = OTHER; note = 2'-fluoro adenosine phosphorothioate
  modified_base 17: mod_base = OTHER; note = 2'-O-methyl adenosine phosphorothioate
  modified_base 18: mod_base = OTHER; note = 2'-fluoro cytosine phosphorothioate
  modified_base 19: mod_base = OTHER; note = 2'-O-methyl adenosine phosphorothioate
  modified_base 20: mod_base = OTHER; note = 2'-fluoro uridine
ttaagggcctcctcaaacat

SEQ ID NO: 319 - RNA, 20 nt, synthetic construct
  source 1..20: mol_type = other RNA
  modified_base 1: mod_base = OTHER; note = 5' phosphate 2'-O-methyl uridine phosphorothioate
  modified_base 2: mod_base = OTHER; note = 2'-fluoro uridine phosphorothioate
  modified_base 3: mod_base = OTHER; note = 2'-O-methyl cytosine
  modified_base 4: mod_base = OTHER; note = 2'-fluoro adenosine
  modified_base 5: mod_base = OTHER; note = 2'-O-methyl guanosine
  modified_base 6: mod_base = OTHER; note = 2'-fluoro uridine
  modified_base 7: mod_base = OTHER; note = 2'-O-methyl adenosine
  modified_base 8: mod_base = OTHER; note = 2'-fluoro guanosine
  modified_base 9: mod_base = OTHER; note = 2'-O-methyl cytosine
  modified_base 10: mod_base = OTHER; note = 2'-fluoro uridine
  modified_base 11: mod_base = OTHER; note = 2'-O-methyl uridine
  modified_base 12: mod_base = OTHER; note = 2'-fluoro cytosine
  modified_base 13: mod_base = OTHER; note = 2'-O-methyl cytosine phosphorothioate
  modified_base 14: mod_base = OTHER; note = 2'-fluoro cytosine phosphorothioate
  modified_base 15: mod_base = OTHER; note = 2'-O-methyl uridine phosphorothioate
  modified_base 16: mod_base = OTHER; note = 2'-fluoro uridine phosphorothioate
  modified_base 17: mod_base = OTHER; note = 2'-O-methyl adenosine phosphorothioate
  modified_base 18: mod_base = OTHER; note = 2'-fluoro adenosine phosphorothioate
  modified_base 19: mod_base = OTHER; note = 2'-O-methyl guanosine phosphorothioate
  modified_base 20: mod_base = OTHER; note = 2'-fluoro guanosine
ttcagtagcttcccttaagg

SEQ ID NO: 320 - RNA, 20 nt, synthetic construct
  source 1..20: mol_type = other RNA
  modified_base 1: mod_base = OTHER; note = 5' phosphate 2'-O-methyl uridine phosphorothioate
  modified_base 2: mod_base = OTHER; note = 2'-fluoro uridine phosphorothioate
  modified_base 3: mod_base = OTHER; note = 2'-O-methyl uridine
  modified_base 4: mod_base = OTHER; note = 2'-fluoro cytosine
  modified_base 5: mod_base = OTHER; note = 2'-O-methyl uridine
  modified_base 6: mod_base = OTHER; note = 2'-fluoro uridine
  modified_base 7: mod_base = OTHER; note = 2'-O-methyl adenosine
  modified_base 8: mod_base = OTHER; note = 2'-fluoro cytosine
  modified_base 9: mod_base = OTHER; note = 2'-O-methyl guanosine
  modified_base 10: mod_base = OTHER; note = 2'-fluoro uridine
  modified_base 11: mod_base = OTHER; note = 2'-O-methyl guanosine
  modified_base 12: mod_base = OTHER; note = 2'-fluoro uridine
  modified_base 13: mod_base = OTHER; note = 2'-O-methyl uridine phosphorothioate
  modified_base 14: mod_base = OTHER; note = 2'-fluoro adenosine phosphorothioate
  modified_base 15: mod_base = OTHER; note = 2'-O-methyl uridine phosphorothioate
  modified_base 16: mod_base = OTHER; note = 2'-fluoro adenosine phosphorothioate
  modified_base 17: mod_base = OTHER; note = 2'-O-methyl adenosine phosphorothioate
  modified_base 18: mod_base = OTHER; note = 2'-fluoro uridine phosphorothioate
  modified_base 19: mod_base = OTHER; note = 2'-O-methyl uridine phosphorothioate
  modified_base 20: mod_base = OTHER; note = 2'-fluoro cytosine
tttcttacgtgttataattc

SEQ ID NO: 321 - RNA, 20 nt, synthetic construct
  source 1..20: mol_type = other RNA
  modified_base 1: mod_base = OTHER; note = 5' phosphate 2'-O-methyl uridine phosphorothioate
  modified_base 2: mod_base = OTHER; note = 2'-fluoro uridine phosphorothioate
  modified_base 3: mod_base = OTHER; note = 2'-O-methyl uridine
  modified_base 4: mod_base = OTHER; note = 2'-fluoro cytosine
  modified_base 5: mod_base = OTHER; note = 2'-O-methyl uridine
  modified_base 6: mod_base = OTHER; note = 2'-fluoro uridine
  modified_base 7: mod_base = OTHER; note = 2'-O-methyl adenosine
  modified_base 8: mod_base = OTHER; note = 2'-fluoro cytosine
  modified_base 9: mod_base = OTHER; note = 2'-O-methyl adenosine
  modified_base 10: mod_base = OTHER; note = 2'-fluoro adenosine
  modified_base 11: mod_base = OTHER; note = 2'-O-methyl adenosine
  modified_base 12: mod_base = OTHER; note = 2'-fluoro uridine
  modified_base 13: mod_base = OTHER; note = 2'-O-methyl guanosine phosphorothioate
  modified_base 14: mod_base = OTHER; note = 2'-fluoro uridine phosphorothioate
  modified_base 15: mod_base = OTHER; note = 2'-O-methyl adenosine phosphorothioate
  modified_base 16: mod_base = OTHER; note = 2'-fluoro adenosine phosphorothioate
  modified_base 17: mod_base = OTHER; note = 2'-O-methyl adenosine phosphorothioate
  modified_base 18: mod_base = OTHER; note = 2'-fluoro cytosine phosphorothioate
  modified_base 19: mod_base = OTHER; note = 2'-O-methyl adenosine phosphorothioate
  modified_base 20: mod_base = OTHER; note = 2'-fluoro uridine
tttcttacaaatgtaaacat

SEQ ID NO: 322 - RNA, 20 nt, synthetic construct
  source 1..20: mol_type = other RNA
  modified_base 1: mod_base = OTHER; note = 5' phosphate 2'-O-methyl uridine phosphorothioate
  modified_base 2: mod_base = OTHER; note = 2'-fluoro guanosine phosphorothioate
  modified_base 3: mod_base = OTHER; note = 2'-O-methyl uridine
  modified_base 4: mod_base = OTHER; note = 2'-fluoro guanosine
  modified_base 5: mod_base = OTHER; note = 2'-O-methyl uridine
  modified_base 6: mod_base = OTHER; note = 2'-fluoro uridine
  modified_base 7: mod_base = OTHER; note = 2'-O-methyl adenosine
  modified_base 8: mod_base = OTHER; note = 2'-fluoro uridine
  modified_base 9: mod_base = OTHER; note = 2'-O-methyl uridine
  modified_base 10: mod_base = OTHER; note = 2'-fluoro uridine
  modified_base 11: mod_base = OTHER; note = 2'-O-methyl cytosine
  modified_base 12: mod_base = OTHER; note = 2'-fluoro uridine
  modified_base 13: mod_base = OTHER; note = 2'-O-methyl uridine phosphorothioate
  modified_base 14: mod_base = OTHER; note = 2'-fluoro adenosine phosphorothioate
  modified_base 15: mod_base = OTHER; note = 2'-O-methyl cytosine phosphorothioate
  modified_base 16: mod_base = OTHER; note = 2'-fluoro adenosine phosphorothioate
  modified_base 17: mod_base = OTHER; note = 2'-O-methyl adenosine phosphorothioate
  modified_base 18: mod_base = OTHER; note = 2'-fluoro adenosine phosphorothioate
  modified_base 19: mod_base = OTHER; note = 2'-O-methyl uridine phosphorothioate
  modified_base 20: mod_base = OTHER; note = 2'-fluoro guanosine
tgtgttatttcttacaaatg

SEQ ID NO: 323 - RNA, 20 nt, synthetic construct
  source 1..20: mol_type = other RNA
  modified_base 1: mod_base = OTHER; note = 5' phosphate 2'-O-methyl uridine phosphorothioate
  modified_base 2: mod_base = OTHER; note = 2'-fluoro uridine phosphorothioate
  modified_base 3: mod_base = OTHER; note = 2'-O-methyl uridine
  modified_base 4: mod_base = OTHER; note = 2'-fluoro adenosine
  modified_base 5: mod_base = OTHER; note = 2'-O-methyl cytosine
  modified_base 6: mod_base = OTHER; note = 2'-fluoro adenosine
  modified_base 7: mod_base = OTHER; note = 2'-O-methyl uridine
  modified_base 8: mod_base = OTHER; note = 2'-fluoro uridine
  modified_base 9: mod_base = OTHER; note = 2'-O-methyl cytosine
  modified_base 10: mod_base = OTHER; note = 2'-fluoro adenosine
  modified_base 11: mod_base = OTHER; note = 2'-O-methyl cytosine
  modified_base 12: mod_base = OTHER; note = 2'-fluoro adenosine
  modified_base 13: mod_base = OTHER; note = 2'-O-methyl guanosine phosphorothioate
  modified_base 14: mod_base = OTHER; note = 2'-fluoro uridine phosphorothioate
  modified_base 15: mod_base = OTHER; note = 2'-O-methyl guanosine phosphorothioate
  modified_base 16: mod_base = OTHER; note = 2'-fluoro uridine phosphorothioate
  modified_base 17: mod_base = OTHER; note = 2'-O-methyl uridine phosphorothioate
  modified_base 18: mod_base = OTHER; note = 2'-fluoro adenosine phosphorothioate
  modified_base 19: mod_base = OTHER; note = 2'-O-methyl uridine phosphorothioate
  modified_base 20: mod_base = OTHER; note = 2'-fluoro uridine
tttacattcacagtgttatt

SEQ ID NO: 324 - RNA, 20 nt, synthetic construct
  source 1..20: mol_type = other RNA
  modified_base 1: mod_base = OTHER; note = 5' phosphate 2'-O-methyl uridine phosphorothioate
  modified_base 2: mod_base = OTHER; note = 2'-fluoro uridine phosphorothioate
  modified_base 3: mod_base = OTHER; note = 2'-O-methyl uridine
  modified_base 4: mod_base = OTHER; note = 2'-fluoro adenosine
  modified_base 5: mod_base = OTHER; note = 2'-O-methyl cytosine
  modified_base 6: mod_base = OTHER; note = 2'-fluoro uridine
  modified_base 7: mod_base = OTHER; note = 2'-O-methyl adenosine
  modified_base 8: mod_base = OTHER; note = 2'-fluoro adenosine
  modified_base 9: mod_base = OTHER; note = 2'-O-methyl uridine
  modified_base 10: mod_base = OTHER; note = 2'-fluoro guanosine
  modified_base 11: mod_base = OTHER; note = 2'-O-methyl adenosine
  modified_base 12: mod_base = OTHER; note = 2'-fluoro guanosine
  modified_base 13: mod_base = OTHER; note = 2'-O-methyl cytosine phosphorothioate
  modified_base 14: mod_base = OTHER; note = 2'-fluoro uridine phosphorothioate
  modified_base 15: mod_base = OTHER; note = 2'-O-methyl cytosine phosphorothioate
  modified_base 16: mod_base = OTHER; note = 2'-fluoro adenosine phosphorothioate
  modified_base 17: mod_base = OTHER; note = 2'-O-methyl uridine phosphorothioate
  modified_base 18: mod_base = OTHER; note = 2'-fluoro adenosine phosphorothioate
  modified_base 19: mod_base = OTHER; note = 2'-O-methyl uridine phosphorothioate
  modified_base 20: mod_base = OTHER; note = 2'-fluoro uridine
tttactaatgagctcatatt

SEQ ID NO: 325 - RNA, 20 nt, synthetic construct
  source 1..20: mol_type = other RNA
  modified_base 1: mod_base = OTHER; note = 5' phosphate 2'-O-methyl uridine phosphorothioate
  modified_base 2: mod_base = OTHER; note = 2'-fluoro uridine phosphorothioate
  modified_base 3: mod_base = OTHER; note = 2'-O-methyl adenosine
  modified_base 4: mod_base = OTHER; note = 2'-fluoro uridine
  modified_base 5: mod_base = OTHER; note = 2'-O-methyl guanosine
  modified_base 6: mod_base = OTHER; note = 2'-fluoro uridine
  modified_base 7: mod_base = OTHER; note = 2'-O-methyl adenosine
  modified_base 8: mod_base = OTHER; note = 2'-fluoro uridine
  modified_base 9: mod_base = OTHER; note = 2'-O-methyl adenosine
  modified_base 10: mod_base = OTHER; note = 2'-fluoro uridine
  modified_base 11: mod_base = OTHER; note = 2'-O-methyl guanosine
  modified_base 12: mod_base = OTHER; note = 2'-fluoro cytosine
  modified_base 13: mod_base = OTHER; note = 2'-O-methyl guanosine phosphorothioate
  modified_base 14: mod_base = OTHER; note = 2'-fluoro uridine phosphorothioate
  modified_base 15: mod_base = OTHER; note = 2'-O-methyl guanosine phosphorothioate
  modified_base 16: mod_base = OTHER; note = 2'-fluoro guanosine phosphorothioate
  modified_base 17: mod_base = OTHER; note = 2'-O-methyl guanosine phosphorothioate
  modified_base 18: mod_base = OTHER; note = 2'-fluoro uridine phosphorothioate
  modified_base 19: mod_base = OTHER; note = 2'-O-methyl guanosine phosphorothioate
  modified_base 20: mod_base = OTHER; note = 2'-fluoro adenosine
ttatgtatatgcgtgggtga

SEQ ID NO: 326 - RNA, 20 nt, synthetic construct
  source 1..20: mol_type = other RNA
  modified_base 1: mod_base = OTHER; note = 5' phosphate 2'-O-methyl uridine phosphorothioate
  modified_base 2: mod_base = OTHER; note = 2'-fluoro adenosine phosphorothioate
  modified_base 3: mod_base = OTHER; note = 2'-O-methyl uridine
  modified_base 4: mod_base = OTHER; note = 2'-fluoro uridine
  modified_base 5: mod_base = OTHER; note = 2'-O-methyl adenosine
  modified_base 6: mod_base = OTHER; note = 2'-fluoro uridine
  modified_base 7: mod_base = OTHER; note = 2'-O-methyl adenosine
  modified_base 8: mod_base = OTHER; note = 2'-fluoro guanosine
  modified_base 9: mod_base = OTHER; note = 2'-O-methyl adenosine
  modified_base 10: mod_base = OTHER; note = 2'-fluoro uridine
  modified_base 11: mod_base = OTHER; note = 2'-O-methyl guanosine
  modified_base 12: mod_base = OTHER; note = 2'-fluoro uridine
  modified_base 13: mod_base = OTHER; note = 2'-O-methyl guanosine phosphorothioate
  modified_base 14: mod_base = OTHER; note = 2'-fluoro uridine phosphorothioate
  modified_base 15: mod_base = OTHER; note = 2'-O-methyl cytosine phosphorothioate
  modified_base 16: mod_base = OTHER; note = 2'-fluoro uridine phosphorothioate
  modified_base 17: mod_base = OTHER; note = 2'-O-methyl adenosine phosphorothioate
  modified_base 18: mod_base = OTHER; note = 2'-fluoro uridine phosphorothioate
  modified_base 19: mod_base = OTHER; note = 2'-O-methyl adenosine phosphorothioate
  modified_base 20: mod_base = OTHER; note = 2'-fluoro uridine
tattatagatgtgtctatat

SEQ ID NO: 327 - RNA, 20 nt, synthetic construct
  source 1..20: mol_type = other RNA
  modified_base 1: mod_base = OTHER; note = 5' phosphate 2'-O-methyl uridine phosphorothioate
  modified_base 2: mod_base = OTHER; note = 2'-fluoro uridine phosphorothioate
  modified_base 3: mod_base = OTHER; note = 2'-O-methyl uridine
  modified_base 4: mod_base = OTHER; note = 2'-fluoro guanosine
  modified_base 5: mod_base = OTHER; note = 2'-O-methyl adenosine
  modified_base 6: mod_base = OTHER; note = 2'-fluoro guanosine
  modified_base 7: mod_base = OTHER; note = 2'-O-methyl adenosine
  modified_base 8: mod_base = OTHER; note = 2'-fluoro guanosine
  modified_base 9: mod_base = OTHER; note = 2'-O-methyl guanosine
  modified_base 10: mod_base = OTHER; note = 2'-fluoro uridine
  modified_base 11: mod_base = OTHER; note = 2'-O-methyl guanosine
  modified_base 12: mod_base = OTHER; note = 2'-fluoro uridine
  modified_base 13: mod_base = OTHER; note = 2'-O-methyl guanosine phosphorothioate
  modified_base 14: mod_base = OTHER; note = 2'-fluoro uridine phosphorothioate
  modified_base 15: mod_base = OTHER; note = 2'-O-methyl guanosine phosphorothioate
  modified_base 16: mod_base = OTHER; note = 2'-fluoro uridine phosphorothioate
  modified_base 17: mod_base = OTHER; note = 2'-O-methyl guanosine phosphorothioate
  modified_base 18: mod_base = OTHER; note = 2'-fluoro uridine phosphorothioate
  modified_base 19: mod_base = OTHER; note = 2'-O-methyl adenosine phosphorothioate
  modified_base 20: mod_base = OTHER; note = 2'-fluoro adenosine
tttgagaggtgtgtgtgtaa

SEQ ID NO: 328 - RNA, 20 nt, synthetic construct
  source 1..20: mol_type = other RNA
  modified_base 1: mod_base = OTHER; note = 5' phosphate 2'-O-methyl uridine phosphorothioate
  modified_base 2: mod_base = OTHER; note = 2'-fluoro uridine phosphorothioate
  modified_base 3: mod_base = OTHER; note = 2'-O-methyl uridine
  modified_base 4: mod_base = OTHER; note = 2'-fluoro adenosine
  modified_base 5: mod_base = OTHER; note = 2'-O-methyl guanosine
  modified_base 6: mod_base = OTHER; note = 2'-fluoro guanosine
  modified_base 7: mod_base = OTHER; note = 2'-O-methyl adenosine
  modified_base 8: mod_base = OTHER; note = 2'-fluoro adenosine
  modified_base 9: mod_base = OTHER; note = 2'-O-methyl cytosine
  modified_base 10: mod_base = OTHER; note = 2'-fluoro adenosine
  modified_base 11: mod_base = OTHER; note = 2'-O-methyl uridine
  modified_base 12: mod_base = OTHER; note = 2'-fluoro guanosine
  modified_base 13: mod_base = OTHER; note = 2'-O-methyl adenosine phosphorothioate
  modified_base 14: mod_base = OTHER; note = 2'-fluoro uridine phosphorothioate
  modified_base 15: mod_base = OTHER; note = 2'-O-methyl adenosine phosphorothioate
  modified_base 16: mod_base = OTHER; note = 2'-fluoro adenosine phosphorothioate
  modified_base 17: mod_base = OTHER; note = 2'-O-methyl adenosine phosphorothioate
  modified_base 18: mod_base = OTHER; note = 2'-fluoro guanosine phosphorothioate
  modified_base 19: mod_base = OTHER; note = 2'-O-methyl uridine phosphorothioate
  modified_base 20: mod_base = OTHER; note = 2'-fluoro cytosine
tttaggaacatgataaagtc

SEQ ID NO: 329 - RNA, 20 nt, synthetic construct
  source 1..20: mol_type = other RNA
  modified_base 1: mod_base = OTHER; note = 5' phosphate 2'-O-methyl uridine phosphorothioate
  modified_base 2: mod_base = OTHER; note = 2'-fluoro uridine phosphorothioate
  modified_base 3: mod_base = OTHER; note = 2'-O-methyl uridine
  modified_base 4: mod_base = OTHER; note = 2'-fluoro adenosine
  modified_base 5: mod_base = OTHER; note = 2'-O-methyl adenosine
  modified_base 6: mod_base = OTHER; note = 2'-fluoro uridine
  modified_base 7: mod_base = OTHER; note = 2'-O-methyl cytosine
  modified_base 8: mod_base = OTHER; note = 2'-fluoro adenosine
  modified_base 9: mod_base = OTHER; note = 2'-O-methyl cytosine
  modified_base 10: mod_base = OTHER; note = 2'-fluoro adenosine
  modified_base 11: mod_base = OTHER; note = 2'-O-methyl uridine
  modified_base 12: mod_base = OTHER; note = 2'-fluoro uridine
  modified_base 13: mod_base = OTHER; note = 2'-O-methyl uridine phosphorothioate
  modified_base 14: mod_base = OTHER; note = 2'-fluoro guanosine phosphorothioate
  modified_base 15: mod_base = OTHER; note = 2'-O-methyl cytosine phosphorothioate
  modified_base 16: mod_base = OTHER; note = 2'-fluoro adenosine phosphorothioate
  modified_base 17: mod_base = OTHER; note = 2'-O-methyl adenosine phosphorothioate
  modified_base 18: mod_base = OTHER; note = 2'-fluoro cytosine phosphorothioate
  modified_base 19: mod_base = OTHER; note = 2'-O-methyl adenosine phosphorothioate
  modified_base 20: mod_base = OTHER; note = 2'-fluoro adenosine
tttaatcacatttgcaacaa

SEQ ID NO: 330 - RNA, 20 nt, synthetic construct
  source 1..20: mol_type = other RNA
  modified_base 1: mod_base = OTHER; note = 5' phosphate 2'-O-methyl uridine phosphorothioate
  modified_base 2: mod_base = OTHER; note = 2'-fluoro cytosine phosphorothioate
  modified_base 3: mod_base = OTHER; note = 2'-O-methyl cytosine
  modified_base 4: mod_base = OTHER; note = 2'-fluoro adenosine
  modified_base 5: mod_base = OTHER; note = 2'-O-methyl adenosine
  modified_base 6: mod_base = OTHER; note = 2'-fluoro adenosine
  modified_base 7: mod_base = OTHER; note = 2'-O-methyl uridine
  modified_base 8: mod_base = OTHER; note = 2'-fluoro uridine
  modified_base 9: mod_base = OTHER; note = 2'-O-methyl adenosine
  modified_base 10: mod_base = OTHER; note = 2'-fluoro adenosine
  modified_base 11: mod_base = OTHER; note = 2'-O-methyl uridine
  modified_base 12: mod_base = OTHER; note = 2'-fluoro cytosine
  modified_base 13: mod_base = OTHER; note = 2'-O-methyl adenosine phosphorothioate
  modified_base 14: mod_base = OTHER; note = 2'-fluoro cytosine phosphorothioate
  modified_base 15: mod_base = OTHER; note = 2'-O-methyl adenosine phosphorothioate
  modified_base 16: mod_base = OTHER; note = 2'-fluoro uridine phosphorothioate
  modified_base 17: mod_base = OTHER; note = 2'-O-methyl uridine phosphorothioate
  modified_base 18: mod_base = OTHER; note = 2'-fluoro uridine phosphorothioate
  modified_base 19: mod_base = OTHER; note = 2'-O-methyl guanosine phosphorothioate
  modified_base 20: mod_base = OTHER; note = 2'-fluoro cytosine
tccaaattaatcacatttgc

SEQ ID NO: 331 - RNA, 20 nt, synthetic construct
  source 1..20: mol_type = other RNA
  modified_base 1: mod_base = OTHER; note = 5' phosphate 2'-O-methyl uridine phosphorothioate
  modified_base 2: mod_base = OTHER; note = 2'-fluoro adenosine phosphorothioate
  modified_base 3: mod_base = OTHER; note = 2'-O-methyl adenosine
  modified_base 4: mod_base = OTHER; note = 2'-fluoro adenosine
  modified_base 5: mod_base = OTHER; note = 2'-O-methyl adenosine
  modified_base 6: mod_base = OTHER; note = 2'-fluoro cytosine
  modified_base 7: mod_base = OTHER; note = 2'-O-methyl uridine
  modified_base 8: mod_base = OTHER; note = 2'-fluoro uridine
  modified_base 9: mod_base = OTHER; note = 2'-O-methyl guanosine
  modified_base 10: mod_base = OTHER; note = 2'-fluoro adenosine
  modified_base 11: mod_base = OTHER; note = 2'-O-methyl cytosine
  modified_base 12: mod_base = OTHER; note = 2'-fluoro adenosine
  modified_base 13: mod_base = OTHER; note = 2'-O-methyl adenosine phosphorothioate
  modified_base 14: mod_base = OTHER; note = 2'-fluoro cytosine phosphorothioate
  modified_base 15: mod_base = OTHER; note = 2'-O-methyl cytosine phosphorothioate
  modified_base 16: mod_base = OTHER; note = 2'-fluoro adenosine phosphorothioate
  modified_base 17: mod_base = OTHER; note = 2'-O-methyl adenosine phosphorothioate
  modified_base 18: mod_base = OTHER; note = 2'-fluoro adenosine phosphorothioate
  modified_base 19: mod_base = OTHER; note = 2'-O-methyl uridine phosphorothioate
  modified_base 20: mod_base = OTHER; note = 2'-fluoro uridine
taaaacttgacaaccaaatt

SEQ ID NO: 332 - RNA, 20 nt, synthetic construct
  source 1..20: mol_type = other RNA
  modified_base 1: mod_base = OTHER; note = 5' phosphate 2'-O-methyl uridine phosphorothioate
  modified_base 2: mod_base = OTHER; note = 2'-fluoro uridine phosphorothioate
  modified_base 3: mod_base = OTHER; note = 2'-O-methyl uridine
  modified_base 4: mod_base = OTHER; note = 2'-fluoro adenosine
  modified_base 5: mod_base = OTHER; note = 2'-O-methyl cytosine
  modified_base 6: mod_base = OTHER; note = 2'-fluoro cytosine
  modified_base 7: mod_base = OTHER; note = 2'-O-methyl adenosine
  modified_base 8: mod_base = OTHER; note = 2'-fluoro guanosine
  modified_base 9: mod_base = OTHER; note = 2'-O-methyl cytosine
  modified_base 10: mod_base = OTHER; note = 2'-fluoro adenosine
  modified_base 11: mod_base = OTHER; note = 2'-O-methyl guanosine
  modified_base 12: mod_base = OTHER; note = 2'-fluoro guanosine
  modified_base 13: mod_base = OTHER; note = 2'-O-methyl adenosine phosphorothioate
  modified_base 14: mod_base = OTHER; note = 2'-fluoro adenosine phosphorothioate
  modified_base 15: mod_base = OTHER; note = 2'-O-methyl adenosine phosphorothioate
  modified_base 16: mod_base = OTHER; note = 2'-fluoro adenosine phosphorothioate
  modified_base 17: mod_base = OTHER; note = 2'-O-methyl cytosine phosphorothioate
  modified_base 18: mod_base = OTHER; note = 2'-fluoro adenosine phosphorothioate
  modified_base 19: mod_base = OTHER; note = 2'-O-methyl adenosine phosphorothioate
  modified_base 20: mod_base = OTHER; note = 2'-fluoro adenosine
tttaccagcaggaaaacaaa

SEQ ID NO: 333 - RNA, 20 nt, synthetic construct
  source 1..20: mol_type = other RNA
  modified_base 1: mod_base = OTHER; note = 5' phosphate 2'-O-methyl uridine phosphorothioate
  modified_base 2: mod_base = OTHER; note = 2'-fluoro adenosine phosphorothioate
  modified_base 3: mod_base = OTHER; note = 2'-O-methyl uridine
  modified_base 4: mod_base = OTHER; note = 2'-fluoro adenosine
  modified_base 5: mod_base = OTHER; note = 2'-O-methyl uridine
  modified_base 6: mod_base = OTHER; note = 2'-fluoro uridine
  modified_base 7: mod_base = OTHER; note = 2'-O-methyl adenosine
  modified_base 8: mod_base = OTHER; note = 2'-fluoro cytosine
  modified_base 9: mod_base = OTHER; note = 2'-O-methyl cytosine
  modified_base 10: mod_base = OTHER; note = 2'-fluoro adenosine
  modified_base 11: mod_base = OTHER; note = 2'-O-methyl guanosine
  modified_base 12: mod_base = OTHER; note = 2'-fluoro cytosine
  modified_base 13: mod_base = OTHER; note = 2'-O-methyl adenosine phosphorothioate
  modified_base 14: mod_base = OTHER; note = 2'-fluoro guanosine phosphorothioate
  modified_base 15: mod_base = OTHER; note = 2'-O-methyl guanosine phosphorothioate
  modified_base 16: mod_base = OTHER; note = 2'-fluoro adenosine phosphorothioate
  modified_base 17: mod_base = OTHER; note = 2'-O-methyl adenosine phosphorothioate
  modified_base 18: mod_base = OTHER; note = 2'-fluoro adenosine phosphorothioate
  modified_base 19: mod_base = OTHER; note = 2'-O-methyl adenosine phosphorothioate
  modified_base 20: mod_base = OTHER; note = 2'-fluoro cytosine
tatattaccagcaggaaaac

SEQ ID NO: 334 - RNA, 20 nt, synthetic construct
  source 1..20: mol_type = other RNA
  modified_base 1: mod_base = OTHER; note = 5' phosphate 2'-O-methyl uridine phosphorothioate
  modified_base 2: mod_base = OTHER; note = 2'-fluoro uridine phosphorothioate
  modified_base 3: mod_base = OTHER; note = 2'-O-methyl uridine
  modified_base 4: mod_base = OTHER; note = 2'-fluoro adenosine
  modified_base 5: mod_base = OTHER; note = 2'-O-methyl adenosine
  modified_base 6: mod_base = OTHER; note = 2'-fluoro adenosine
  modified_base 7: mod_base = OTHER; note = 2'-O-methyl adenosine
  modified_base 8: mod_base = OTHER; note = 2'-fluoro uridine
  modified_base 9: mod_base = OTHER; note = 2'-O-methyl cytosine
  modified_base 10: mod_base = OTHER; note = 2'-fluoro uridine
  modified_base 11: mod_base = OTHER; note = 2'-O-methyl uridine
  modified_base 12: mod_base = OTHER; note = 2'-fluoro uridine
  modified_base 13: mod_base = OTHER; note = 2'-O-methyl cytosine phosphorothioate
  modified_base 14: mod_base = OTHER; note = 2'-fluoro cytosine phosphorothioate
  modified_base 15: mod_base = OTHER; note = 2'-O-methyl cytosine phosphorothioate
  modified_base 16: mod_base = OTHER; note = 2'-fluoro guanosine phosphorothioate
  modified_base 17: mod_base = OTHER; note = 2'-O-methyl adenosine phosphorothioate
  modified_base 18: mod_base = OTHER; note = 2'-fluoro uridine phosphorothioate
  modified_base 19: mod_base = OTHER; note = 2'-O-methyl adenosine phosphorothioate
  modified_base 20: mod_base = OTHER; note = 2'-fluoro uridine
tttaaaatctttcccgatat

SEQ ID NO: 335 - RNA, 20 nt, synthetic construct
  source 1..20: mol_type = other RNA
  modified_base 1: mod_base = OTHER; note = 5' phosphate 2'-O-methyl uridine phosphorothioate
  modified_base 2: mod_base = OTHER; note = 2'-fluoro adenosine phosphorothioate
  modified_base 3: mod_base = OTHER; note = 2'-O-methyl cytosine
  modified_base 4: mod_base = OTHER; note = 2'-fluoro cytosine
  modified_base 5: mod_base = OTHER; note = 2'-O-methyl cytosine
  modified_base 6: mod_base = OTHER; note = 2'-fluoro uridine
  modified_base 7: mod_base = OTHER; note = 2'-O-methyl guanosine
  modified_base 8: mod_base = OTHER; note = 2'-fluoro guanosine
  modified_base 9: mod_base = OTHER; note = 2'-O-methyl uridine
  modified_base 10: mod_base = OTHER; note = 2'-fluoro uridine
  modified_base 11: mod_base = OTHER; note = 2'-O-methyl uridine
  modified_base 12: mod_base = OTHER; note = 2'-fluoro cytosine
  modified_base 13: mod_base = OTHER; note = 2'-O-methyl adenosine phosphorothioate
  modified_base 14: mod_base = OTHER; note = 2'-fluoro uridine phosphorothioate
  modified_base 15: mod_base = OTHER; note = 2'-O-methyl uridine phosphorothioate
  modified_base 16: mod_base = OTHER; note = 2'-fluoro adenosine phosphorothioate
  modified_base 17: mod_base = OTHER; note = 2'-O-methyl adenosine phosphorothioate
  modified_base 18: mod_base = OTHER; note = 2'-fluoro adenosine phosphorothioate
  modified_base 19: mod_base = OTHER; note = 2'-O-methyl adenosine phosphorothioate
  modified_base 20: mod_base = OTHER; note = 2'-fluoro uridine
taccctggtttcattaaaat

SEQ ID NO: 336 - RNA, 20 nt, synthetic construct
  source 1..20: mol_type = other RNA
  modified_base 1: mod_base = OTHER; note = 5' phosphate 2'-O-methyl uridine phosphorothioate
  modified_base 2: mod_base = OTHER; note = 2'-fluoro uridine phosphorothioate
  modified_base 3: mod_base = OTHER; note = 2'-O-methyl uridine
  modified_base 4: mod_base = OTHER; note = 2'-fluoro cytosine
  modified_base 5: mod_base = OTHER; note = 2'-O-methyl uridine
  modified_base 6: mod_base = OTHER; note = 2'-fluoro adenosine
  modified_base 7: mod_base = OTHER; note = 2'-O-methyl cytosine
  modified_base 8: mod_base = OTHER; note = 2'-fluoro cytosine
  modified_base 9: mod_base = OTHER; note = 2'-O-methyl cytosine
  modified_base 10: mod_base = OTHER; note = 2'-fluoro uridine
  modified_base 11: mod_base = OTHER; note = 2'-O-methyl guanosine
  modified_base 12: mod_base = OTHER; note = 2'-fluoro guanosine
  modified_base 13: mod_base = OTHER; note = 2'-O-methyl uridine phosphorothioate
  modified_base 14: mod_base = OTHER; note = 2'-fluoro uridine phosphorothioate
  modified_base 15: mod_base = OTHER; note = 2'-O-methyl uridine phosphorothioate
  modified_base 16: mod_base = OTHER; note = 2'-fluoro cytosine phosphorothioate
  modified_base 17: mod_base = OTHER; note = 2'-O-methyl adenosine phosphorothioate
  modified_base 18: mod_base = OTHER; note = 2'-fluoro uridine phosphorothioate
  modified_base 19: mod_base = OTHER; note = 2'-O-methyl uridine phosphorothioate
  modified_base 20: mod_base = OTHER; note = 2'-fluoro adenosine
tttctaccctggtttcatta

SEQ ID NO: 337 - RNA, 20 nt, synthetic construct
  source 1..20: mol_type = other RNA
  modified_base 1: mod_base = OTHER; note = 5' phosphate 2'-O-methyl uridine phosphorothioate
  modified_base 2: mod_base = OTHER; note = 2'-fluoro cytosine phosphorothioate
  modified_base 3: mod_base = OTHER; note = 2'-O-methyl adenosine
  modified_base 4: mod_base = OTHER; note = 2'-fluoro guanosine
  modified_base 5: mod_base = OTHER; note = 2'-O-methyl uridine
  modified_base 6: mod_base = OTHER; note = 2'-fluoro guanosine
  modified_base 7: mod_base = OTHER; note = 2'-O-methyl cytosine
  modified_base 8: mod_base = OTHER; note = 2'-fluoro adenosine
  modified_base 9: mod_base = OTHER; note = 2'-O-methyl uridine
  modified_base 10: mod_base = OTHER; note = 2'-fluoro uridine
  modified_base 11: mod_base = OTHER; note = 2'-O-methyl guanosine
  modified_base 12: mod_base = OTHER; note = 2'-fluoro cytosine
  modified_base 13: mod_base = OTHER; note = 2'-O-methyl cytosine phosphorothioate
  modified_base 14: mod_base = OTHER; note = 2'-fluoro adenosine phosphorothioate
  modified_base 15: mod_base = OTHER; note = 2'-O-methyl adenosine phosphorothioate
  modified_base 16: mod_base = OTHER; note = 2'-fluoro adenosine phosphorothioate
  modified_base 17: mod_base = OTHER; note = 2'-O-methyl cytosine phosphorothioate
  modified_base 18: mod_base = OTHER; note = 2'-fluoro adenosine phosphorothioate
  modified_base 19: mod_base = OTHER; note = 2'-O-methyl adenosine phosphorothioate
  modified_base 20: mod_base = OTHER; note = 2'-fluoro uridine
tcagtgcattgccaaacaat

SEQ ID NO: 338 - RNA, 20 nt, synthetic construct
  source 1..20: mol_type = other RNA
  modified_base 1: mod_base = OTHER; note = 5' phosphate 2'-O-methyl uridine phosphorothioate
  modified_base 2: mod_base = OTHER; note = 2'-fluoro cytosine phosphorothioate
  modified_base 3: mod_base = OTHER; note = 2'-O-methyl uridine
  modified_base 4: mod_base = OTHER; note = 2'-fluoro uridine
  modified_base 5: mod_base = OTHER; note = 2'-O-methyl adenosine
  modified_base 6: mod_base = OTHER; note = 2'-fluoro guanosine
  modified_base 7: mod_base = OTHER; note = 2'-O-methyl adenosine
  modified_base 8: mod_base = OTHER; note = 2'-fluoro adenosine
  modified_base 9: mod_base = OTHER; note = 2'-O-methyl adenosine
  modified_base 10: mod_base = OTHER; note = 2'-fluoro cytosine
  modified_base 11: mod_base = OTHER; note = 2'-O-methyl adenosine
  modified_base 12: mod_base = OTHER; note = 2'-fluoro adenosine
  modified_base 13: mod_base = OTHER; note = 2'-O-methyl cytosine phosphorothioate
  modified_base 14: mod_base = OTHER; note = 2'-fluoro uridine phosphorothioate
  modified_base 15: mod_base = OTHER; note = 2'-O-methyl guanosine phosphorothioate
  modified_base 16: mod_base = OTHER; note = 2'-fluoro adenosine phosphorothioate
  modified_base 17: mod_base = OTHER; note = 2'-O-methyl guanosine phosphorothioate
  modified_base 18: mod_base = OTHER; note = 2'-fluoro guanosine phosphorothioate
  modified_base 19: mod_base = OTHER; note = 2'-O-methyl guanosine phosphorothioate
  modified_base 20: mod_base = OTHER; note = 2'-fluoro guanosine
tcttagaaacaactgagggg

SEQ ID NO: 339 - RNA, 20 nt, synthetic construct
  source 1..20: mol_type = other RNA
  modified_base 1: mod_base = OTHER; note = 5' phosphate 2'-O-methyl uridine phosphorothioate
  modified_base 2: mod_base = OTHER; note = 2'-fluoro adenosine phosphorothioate
  modified_base 3: mod_base = OTHER; note = 2'-O-methyl uridine
  modified_base 4: mod_base = OTHER; note = 2'-fluoro adenosine
  modified_base 5: mod_base = OTHER; note = 2'-O-methyl cytosine
  modified_base 6: mod_base = OTHER; note = 2'-fluoro adenosine
  modified_base 7: mod_base = OTHER; note = 2'-O-methyl uridine
  modified_base 8: mod_base = OTHER; note = 2'-fluoro cytosine
  modified_base 9: mod_base = OTHER; note = 2'-O-methyl uridine
  modified_base 10: mod_base = OTHER; note = 2'-fluoro cytosine
  modified_base 11: mod_base = OTHER; note = 2'-O-methyl uridine
  modified_base 12: mod_base = OTHER; note = 2'-fluoro cytosine
  modified_base 13: mod_base = OTHER; note = 2'-O-methyl guanosine phosphorothioate
  modified_base 14: mod_base = OTHER; note = 2'-fluoro uridine phosphorothioate
  modified_base 15: mod_base = OTHER; note = 2'-O-methyl cytosine phosphorothioate
  modified_base 16: mod_base = OTHER; note = 2'-fluoro adenosine phosphorothioate
  modified_base 17: mod_base = OTHER; note = 2'-O-methyl guanosine phosphorothioate
  modified_base 18: mod_base = OTHER; note = 2'-fluoro uridine phosphorothioate
  modified_base 19: mod_base = OTHER; note = 2'-O-methyl cytosine phosphorothioate
  modified_base 20: mod_base = OTHER; note = 2'-fluoro cytosine
tatacatctctcgtcagtcc

SEQ ID NO: 340 - RNA, 20 nt, synthetic construct
  source 1..20: mol_type = other RNA
  modified_base 1: mod_base = OTHER; note = 5' phosphate 2'-O-methyl uridine phosphorothioate
  modified_base 2: mod_base = OTHER; note = 2'-fluoro uridine phosphorothioate
  modified_base 3: mod_base = OTHER; note = 2'-O-methyl adenosine
  modified_base 4: mod_base = OTHER; note = 2'-fluoro adenosine
  modified_base 5: mod_base = OTHER; note = 2'-O-methyl adenosine
  modified_base 6: mod_base = OTHER; note = 2'-fluoro uridine
  modified_base 7: mod_base = OTHER; note = 2'-O-methyl adenosine
  modified_base 8: mod_base = OTHER; note = 2'-fluoro uridine
  modified_base 9: mod_base = OTHER; note = 2'-O-methyl adenosine
  modified_base 10: mod_base = OTHER; note = 2'-fluoro cytosine
  modified_base 11: mod_base = OTHER; note = 2'-O-methyl adenosine
  modified_base 12: mod_base = OTHER; note = 2'-fluoro uridine
  modified_base 13: mod_base = OTHER; note = 2'-O-methyl cytosine phosphorothioate
  modified_base 14: mod_base = OTHER; note = 2'-fluoro uridine phosphorothioate
  modified_base 15: mod_base = OTHER; note = 2'-O-methyl cytosine phosphorothioate
  modified_base 16: mod_base = OTHER; note = 2'-fluoro uridine phosphorothioate
  modified_base 17: mod_base = OTHER; note = 2'-O-methyl cytosine phosphorothioate
  modified_base 18: mod_base = OTHER; note = 2'-fluoro guanosine phosphorothioate
  modified_base 19: mod_base = OTHER; note = 2'-O-methyl uridine phosphorothioate
  modified_base 20: mod_base = OTHER; note = 2'-fluoro cytosine
ttaaatatacatctctcgtc

SEQ ID NO: 341 - RNA, 20 nt, synthetic construct
  source 1..20: mol_type = other RNA
  modified_base 1: mod_base = OTHER; note = 5' phosphate 2'-O-methyl uridine phosphorothioate
  modified_base 2: mod_base = OTHER; note = 2'-fluoro guanosine phosphorothioate
  modified_base 3: mod_base = OTHER; note = 2'-O-methyl uridine
  modified_base 4: mod_base = OTHER; note = 2'-fluoro uridine
  modified_base 5: mod_base = OTHER; note = 2'-O-methyl uridine
  modified_base 6: mod_base = OTHER; note = 2'-fluoro guanosine
  modified_base 7: mod_base = OTHER; note = 2'-O-methyl cytosine
  modified_base 8: mod_base = OTHER; note = 2'-fluoro adenosine
  modified_base 9: mod_base = OTHER; note = 2'-O-methyl guanosine
  modified_base 10: mod_base = OTHER; note = 2'-fluoro cytosine
  modified_base 11: mod_base = OTHER; note = 2'-O-methyl adenosine
  modified_base 12: mod_base = OTHER; note = 2'-fluoro guanosine
  modified_base 13: mod_base = OTHER; note = 2'-O-methyl uridine phosphorothioate
  modified_base 14: mod_base = OTHER; note = 2'-fluoro uridine phosphorothioate
  modified_base 15: mod_base = OTHER; note = 2'-O-methyl adenosine phosphorothioate
  modified_base 16: mod_base = OTHER; note = 2'-fluoro adenosine phosphorothioate
  modified_base 17: mod_base = OTHER; note = 2'-O-methyl adenosine phosphorothioate
  modified_base 18: mod_base = OTHER; note = 2'-fluoro adenosine phosphorothioate
  modified_base 19: mod_base = OTHER; note = 2'-O-methyl adenosine phosphorothioate
  modified_base 20: mod_base = OTHER; note = 2'-fluoro adenosine
tgtttgcagcagttaaaaaa

SEQ ID NO: 342 - RNA, 20 nt, synthetic construct
  source 1..20: mol_type = other RNA
  modified_base 1: mod_base = OTHER; note = 5' phosphate 2'-O-methyl uridine phosphorothioate
  modified_base 2: mod_base = OTHER; note = 2'-fluoro adenosine phosphorothioate
  modified_base 3: mod_base = OTHER; note = 2'-O-methyl cytosine
  modified_base 4: mod_base = OTHER; note = 2'-fluoro adenosine
  modified_base 5: mod_base = OTHER; note = 2'-O-methyl adenosine
  modified_base 6: mod_base = OTHER; note = 2'-fluoro uridine
  modified_base 7: mod_base = OTHER; note = 2'-O-methyl guanosine
  modified_base 8: mod_base = OTHER; note = 2'-fluoro uridine
  modified_base 9: mod_base = OTHER; note = 2'-O-methyl uridine
  modified_base 10: mod_base = OTHER; note = 2'-fluoro uridine
  modified_base 11: mod_base = OTHER; note = 2'-O-methyl guanosine
  modified_base 12: mod_base = OTHER; note = 2'-fluoro cytosine
  modified_base 13: mod_base = OTHER; note = 2'-O-methyl adenosine phosphorothioate
  modified_base 14: mod_base = OTHER; note = 2'-fluoro guanosine phosphorothioate
  modified_base 15: mod_base = OTHER; note = 2'-O-methyl cytosine phosphorothioate
  modified_base 16: mod_base = OTHER; note = 2'-fluoro adenosine phosphorothioate
  modified_base 17: mod_base = OTHER; note = 2'-O-methyl guanosine phosphorothioate
  modified_base 18: mod_base = OTHER; note = 2'-fluoro uridine phosphorothioate
  modified_base 19: mod_base = OTHER; note = 2'-O-methyl uridine phosphorothioate
  modified_base 20: mod_base = OTHER; note = 2'-fluoro adenosine
tacaatgtttgcagcagtta

SEQ ID NO: 343 - RNA, 15 nt, synthetic construct
  source 1..15: mol_type = other RNA
  modified_base 1: mod_base = OTHER; note = 2'-fluoro adenosine phosphorothioate
  modified_base 2: mod_base = OTHER; note = 2'-O-methyl adenosine phosphorothioate
  modified_base 3: mod_base = OTHER; note = 2'-fluoro cytosine
  modified_base 4: mod_base = OTHER; note = 2'-O-methyl guanosine
  modified_base 5: mod_base = OTHER; note = 2'-fluoro uridine
  modified_base 6: mod_base = OTHER; note = 2'-O-methyl adenosine
  modified_base 7: mod_base = OTHER; note = 2'-fluoro adenosine
  modified_base 8: mod_base = OTHER; note = 2'-O-methyl cytosine
  modified_base 9: mod_base = OTHER; note = 2'-fluoro uridine
  modified_base 10: mod_base = OTHER; note = 2'-O-methyl cytosine
  modified_base 11: mod_base = OTHER; note = 2'-fluoro uridine
  modified_base 12: mod_base = OTHER; note = 2'-O-methyl uridine
  modified_base 13: mod_base = OTHER; note = 2'-fluoro uridine phosphorothioate
  modified_base 14: mod_base = OTHER; note = 2'-O-methyl cytosine phosphorothioate
  modified_base 15: mod_base = OTHER; note = 2'-fluoro adenosine triethylene glycol
aacgtaactctttca

SEQ ID NO: 344 - RNA, 15 nt, synthetic construct
  source 1..15: mol_type = other RNA
  modified_base 1: mod_base = OTHER; note = 2'-fluoro cytosine phosphorothioate
  modified_base 2: mod_base = OTHER; note = 2'-O-methyl uridine phosphorothioate
  modified_base 3: mod_base = OTHER; note = 2'-fluoro adenosine
  modified_base 4: mod_base = OTHER; note = 2'-O-methyl uridine
  modified_base 5: mod_base = OTHER; note = 2'-fluoro guanosine
  modified_base 6: mod_base = OTHER; note = 2'-O-methyl cytosine
  modified_base 7: mod_base = OTHER; note = 2'-fluoro cytosine
  modified_base 8: mod_base = OTHER; note = 2'-O-methyl cytosine
  modified_base 9: mod_base = OTHER; note = 2'-fluoro guanosine
  modified_base 10: mod_base = OTHER; note = 2'-O-methyl uridine
  modified_base 11: mod_base = OTHER; note = 2'-fluoro guanosine
  modified_base 12: mod_base = OTHER; note = 2'-O-methyl uridine
  modified_base 13: mod_base = OTHER; note = 2'-fluoro adenosine phosphorothioate
  modified_base 14: mod_base = OTHER; note = 2'-O-methyl adenosine phosphorothioate
  modified_base 15: mod_base = OTHER; note = 2'-fluoro adenosine triethylene glycol
ctatgcccgtgtaaa

SEQ ID NO: 345 - RNA, 15 nt, synthetic construct
  source 1..15: mol_type = other RNA
  modified_base 1: mod_base = OTHER; note = 2'-fluoro guanosine phosphorothioate
  modified_base 2: mod_base = OTHER; note = 2'-O-methyl cytosine phosphorothioate
  modified_base 3: mod_base = OTHER; note = 2'-fluoro cytosine
  modified_base 4: mod_base = OTHER; note = 2'-O-methyl cytosine
  modified_base 5: mod_base = OTHER; note = 2'-fluoro guanosine
  modified_base 6: mod_base = OTHER; note = 2'-O-methyl uridine
  modified_base 7: mod_base = OTHER; note = 2'-fluoro guanosine
  modified_base 8: mod_base = OTHER; note = 2'-O-methyl uridine
  modified_base 9: mod_base = OTHER; note = 2'-fluoro adenosine
  modified_base 10: mod_base = OTHER; note = 2'-O-methyl adenosine
  modified_base 11: mod_base = OTHER; note = 2'-fluoro adenosine
  modified_base 12: mod_base = OTHER; note = 2'-O-methyl guanosine
  modified_base 13: mod_base = OTHER; note = 2'-fluoro uridine phosphorothioate
  modified_base 14: mod_base = OTHER; note = 2'-O-methyl adenosine phosphorothioate
  modified_base 15: mod_base = OTHER; note = 2'-fluoro adenosine triethylene glycol
gcccgtgtaaagtaa

SEQ ID NO: 346 - RNA, 15 nt, synthetic construct
  source 1..15: mol_type = other RNA
  modified_base 1: mod_base = OTHER; note = 2'-fluoro adenosine phosphorothioate
  modified_base 2: mod_base = OTHER; note = 2'-O-methyl guanosine phosphorothioate
  modified_base 3: mod_base = OTHER; note = 2'-fluoro uridine
  modified_base 4: mod_base = OTHER; note = 2'-O-methyl cytosine
  modified_base 5: mod_base = OTHER; note = 2'-fluoro adenosine
  modified_base 6: mod_base = OTHER; note = 2'-O-methyl guanosine
  modified_base 7: mod_base = OTHER; note = 2'-fluoro guanosine
  modified_base 8: mod_base = OTHER; note = 2'-O-methyl adenosine
  modified_base 9: mod_base = OTHER; note = 2'-fluoro guanosine
  modified_base 10: mod_base = OTHER; note = 2'-O-methyl adenosine
  modified_base 11: mod_base = OTHER; note = 2'-fluoro guanosine
  modified_base 12: mod_base = OTHER; note = 2'-O-methyl uridine
  modified_base 13: mod_base = OTHER; note = 2'-fluoro guanosine phosphorothioate
  modified_base 14: mod_base = OTHER; note = 2'-O-methyl cytosine phosphorothioate
  modified_base 15: mod_base = OTHER; note = 2'-fluoro adenosine triethylene glycol
agtcaggagagtgca

SEQ ID NO: 347 - RNA, 15 nt, synthetic construct
  source 1..15: mol_type = other RNA
  modified_base 1: mod_base = OTHER; note = 2'-fluoro uridine phosphorothioate
  modified_base 2: mod_base = OTHER; note = 2'-O-methyl guanosine phosphorothioate
  modified_base 3: mod_base = OTHER; note = 2'-fluoro guanosine
  modified_base 4: mod_base = OTHER; note = 2'-O-methyl guanosine
  modified_base 5: mod_base = OTHER; note = 2'-fluoro uridine
  modified_base 6: mod_base = OTHER; note = 2'-O-methyl adenosine
  modified_base 7: mod_base = OTHER; note = 2'-fluoro uridine
  modified_base 8: mod_base = OTHER; note = 2'-O-methyl uridine
  modified_base 9: mod_base = OTHER; note = 2'-fluoro guanosine
  modified_base 10: mod_base = OTHER; note = 2'-O-methyl adenosine
  modified_base 11: mod_base = OTHER; note = 2'-fluoro adenosine
  modified_base 12: mod_base = OTHER; note = 2'-O-methyl uridine
  modified_base 13: mod_base = OTHER; note = 2'-fluoro guanosine phosphorothioate
  modified_base 14: mod_base = OTHER; note = 2'-O-methyl uridine phosphorothioate
  modified_base 15: mod_base = OTHER; note = 2'-fluoro adenosine triethylene glycol
tgggtattgaatgta

SEQ ID NO: 348 - RNA, 15 nt, synthetic construct
  source 1..15: mol_type = other RNA
  modified_base 1: mod_base = OTHER; note = 2'-fluoro uridine phosphorothioate
  modified_base 2: mod_base = OTHER; note = 2'-O-methyl guanosine phosphorothioate
  modified_base 3: mod_base = OTHER; note = 2'-fluoro guanosine
  modified_base 4: mod_base = OTHER; note = 2'-O-methyl uridine
  modified_base 5: mod_base = OTHER; note = 2'-fluoro adenosine
  modified_base 6: mod_base = OTHER; note = 2'-O-methyl adenosine
  modified_base 7: mod_base = OTHER; note = 2'-fluoro guanosine
  modified_base 8: mod_base = OTHER; note = 2'-O-methyl uridine
  modified_base 9: mod_base = OTHER; note = 2'-fluoro guanosine
  modified_base 10: mod_base = OTHER; note = 2'-O-methyl guanosine
  modified_base 11: mod_base = OTHER; note = 2'-fluoro adenosine
  modified_base 12: mod_base = OTHER; note = 2'-O-methyl guanosine
  modified_base 13: mod_base = OTHER; note = 2'-fluoro guanosine phosphorothioate
  modified_base 14: mod_base = OTHER; note = 2'-O-methyl adenosine phosphorothioate
  modified_base 15: mod_base = OTHER; note = 2'-fluoro adenosine triethylene glycol
tggtaagtggaggaa

SEQ ID NO: 349 - RNA, 15 nt, synthetic construct
  source 1..15: mol_type = other RNA
  modified_base 1: mod_base = OTHER; note = 2'-fluoro adenosine phosphorothioate
  modified_base 2: mod_base = OTHER; note = 2'-O-methyl guanosine phosphorothioate
  modified_base 3: mod_base = OTHER; note = 2'-fluoro uridine
  modified_base 4: mod_base = OTHER; note = 2'-O-methyl guanosine
  modified_base 5: mod_base = OTHER; note = 2'-fluoro guanosine
  modified_base 6: mod_base = OTHER; note = 2'-O-methyl adenosine
  modified_base 7: mod_base = OTHER; note = 2'-fluoro guanosine
  modified_base 8: mod_base = OTHER; note = 2'-O-methyl guanosine
  modified_base 9: mod_base = OTHER; note = 2'-fluoro adenosine
  modified_base 10: mod_base = OTHER; note = 2'-O-methyl adenosine
  modified_base 11: mod_base = OTHER; note = 2'-fluoro adenosine
  modified_base 12: mod_base = OTHER; note = 2'-O-methyl uridine
  modified_base 13: mod_base = OTHER; note = 2'-fluoro guanosine phosphorothioate
  modified_base 14: mod_base = OTHER; note = 2'-O-methyl uridine phosphorothioate
  modified_base 15: mod_base = OTHER; note = 2'-fluoro adenosine triethylene glycol
agtggaggaaatgta

SEQ ID NO: 350 - RNA, 15 nt, synthetic construct
  source 1..15: mol_type = other RNA
  modified_base 1: mod_base = OTHER; note = 2'-fluoro uridine phosphorothioate
  modified_base 2: mod_base = OTHER; note = 2'-O-methyl uridine phosphorothioate
  modified_base 3: mod_base = OTHER; note = 2'-fluoro guanosine
  modified_base 4: mod_base = OTHER; note = 2'-O-methyl guanosine
  modified_base 5: mod_base = OTHER; note = 2'-fluoro adenosine
  modified_base 6: mod_base = OTHER; note = 2'-O-methyl adenosine
  modified_base 7: mod_base = OTHER; note = 2'-fluoro cytosine
  modified_base 8: mod_base = OTHER; note = 2'-O-methyl uridine
  modified_base 9: mod_base = OTHER; note = 2'-fluoro cytosine
  modified_base 10: mod_base = OTHER; note = 2'-O-methyl uridine
  modified_base 11: mod_base = OTHER; note = 2'-fluoro guanosine
  modified_base 12: mod_base = OTHER; note = 2'-O-methyl uridine
  modified_base 13: mod_base = OTHER; note = 2'-fluoro guanosine phosphorothioate
  modified_base 14: mod_base = OTHER; note = 2'-O-methyl cytosine phosphorothioate
  modified_base 15: mod_base = OTHER; note = 2'-fluoro adenosine triethylene glycol
ttggaactctgtgca

SEQ ID NO: 351 - RNA, 15 nt, synthetic construct
  source 1..15: mol_type = other RNA
  modified_base 1: mod_base = OTHER; note = 2'-fluoro uridine phosphorothioate
  modified_base 2: mod_base = OTHER; note = 2'-O-methyl guanosine phosphorothioate
  modified_base 3: mod_base = OTHER; note = 2'-fluoro adenosine
  modified_base 4: mod_base = OTHER; note = 2'-O-methyl guanosine
  modified_base 5: mod_base = OTHER; note = 2'-fluoro guanosine
  modified_base 6: mod_base = OTHER; note = 2'-O-methyl adenosine
  modified_base 7: mod_base = OTHER; note = 2'-fluoro guanosine
  modified_base 8: mod_base = OTHER; note = 2'-O-methyl guanosine
  modified_base 9: mod_base = OTHER; note = 2'-fluoro cytosine
  modified_base 10: mod_base = OTHER; note = 2'-O-methyl cytosine
  modified_base 11: mod_base = OTHER; note = 2'-fluoro cytosine
  modified_base 12: mod_base = OTHER; note = 2'-O-methyl uridine
  modified_base 13: mod_base = OTHER; note = 2'-fluoro uridine phosphorothioate
  modified_base 14: mod_base = OTHER; note = 2'-O-methyl adenosine phosphorothioate
  modified_base 15: mod_base = OTHER; note = 2'-fluoro adenosine triethylene glycol
tgaggaggcccttaa

SEQ ID NO: 352 - RNA, 15 nt, synthetic construct
  source 1..15: mol_type = other RNA
  modified_base 1: mod_base = OTHER; note = 2'-fluoro adenosine phosphorothioate
  modified_base 2: mod_base = OTHER; note = 2'-O-methyl guanosine phosphorothioate
  modified_base 3: mod_base = OTHER; note = 2'-fluoro guanosine
  modified_base 4: mod_base = OTHER; note = 2'-O-methyl guanosine
  modified_base 5: mod_base = OTHER; note = 2'-fluoro adenosine
  modified_base 6: mod_base = OTHER; note = 2'-O-methyl adenosine
  modified_base 7: mod_base = OTHER; note = 2'-fluoro guanosine
  modified_base 8: mod_base = OTHER; note = 2'-O-methyl cytosine
  modified_base 9: mod_base = OTHER; note = 2'-fluoro uridine
  modified_base 10: mod_base = OTHER; note = 2'-O-methyl adenosine
  modified_base 11: mod_base = OTHER; note = 2'-fluoro cytosine
  modified_base 12: mod_base = OTHER; note = 2'-O-methyl uridine
  modified_base 13: mod_base = OTHER; note = 2'-fluoro guanosine phosphorothioate
  modified_base 14: mod_base = OTHER; note = 2'-O-methyl adenosine phosphorothioate
  modified_base 15: mod_base = OTHER; note = 2'-fluoro adenosine triethylene glycol
agggaagctactgaa

SEQ ID NO: 353 - RNA, 15 nt, synthetic construct
  source 1..15: mol_type = other RNA
  modified_base 1: mod_base = OTHER; note = 2'-fluoro adenosine phosphorothioate
  modified_base 2: mod_base = OTHER; note = 2'-O-methyl uridine phosphorothioate
  modified_base 3: mod_base = OTHER; note = 2'-fluoro adenosine
  modified_base 4: mod_base = OTHER; note = 2'-O-methyl adenosine
  modified_base 5: mod_base = OTHER; note = 2'-fluoro cytosine
  modified_base 6: mod_base = OTHER; note = 2'-O-methyl adenosine
  modified_base 7: mod_base = OTHER; note = 2'-fluoro cytosine
  modified_base 8: mod_base = OTHER; note = 2'-O-methyl guanosine
  modified_base 9: mod_base = OTHER; note = 2'-fluoro uridine
  modified_base 10: mod_base = OTHER; note = 2'-O-methyl adenosine
  modified_base 11: mod_base = OTHER; note = 2'-fluoro adenosine
  modified_base 12: mod_base = OTHER; note = 2'-O-methyl guanosine
  modified_base 13: mod_base = OTHER; note = 2'-fluoro adenosine phosphorothioate
  modified_base 14: mod_base = OTHER; note = 2'-O-methyl adenosine phosphorothioate
  modified_base 15: mod_base = OTHER; note = 2'-fluoro adenosine triethylene glycol
ataacacgtaagaaa

SEQ ID NO: 354 - RNA, 15 nt, synthetic construct
  source 1..15: mol_type = other RNA
  modified_base 1: mod_base = OTHER; note = 2'-fluoro uridine phosphorothioate
  modified_base 2: mod_base = OTHER; note = 2'-O-methyl adenosine phosphorothioate
  modified_base 3: mod_base = OTHER; note = 2'-fluoro cytosine
  modified_base 4: mod_base = OTHER; note = 2'-O-methyl adenosine
  modified_base 5: mod_base = OTHER; note = 2'-fluoro uridine
  modified_base 6: mod_base = OTHER; note = 2'-O-methyl uridine
  modified_base 7: mod_base = OTHER; note = 2'-fluoro uridine
  modified_base 8: mod_base = OTHER; note = 2'-O-methyl guanosine
  modified_base 9: mod_base = OTHER; note = 2'-fluoro uridine
  modified_base 10: mod_base = OTHER; note = 2'-O-methyl adenosine
  modified_base 11: mod_base = OTHER; note = 2'-fluoro adenosine
  modified_base 12: mod_base = OTHER; note = 2'-O-methyl guanosine
  modified_base 13: mod_base = OTHER; note = 2'-fluoro adenosine phosphorothioate
  modified_base 14: mod_base = OTHER; note = 2'-O-methyl adenosine phosphorothioate
  modified_base 15: mod_base = OTHER; note = 2'-fluoro adenosine triethylene glycol
tacatttgtaagaaa

SEQ ID NO: 355 - RNA, 15 nt, synthetic construct
  source 1..15: mol_type = other RNA
  modified_base 1: mod_base = OTHER; note = 2'-fluoro guanosine phosphorothioate
  modified_base 2: mod_base = OTHER; note = 2'-O-methyl uridine phosphorothioate
  modified_base 3: mod_base = OTHER; note = 2'-fluoro adenosine
  modified_base 4: mod_base = OTHER; note = 2'-O-methyl adenosine
  modified_base 5: mod_base = OTHER; note = 2'-fluoro guanosine
  modified_base 6: mod_base = OTHER; note = 2'-O-methyl adenosine
  modified_base 7: mod_base = OTHER; note = 2'-fluoro adenosine
  modified_base 8: mod_base = OTHER; note = 2'-O-methyl adenosine
  modified_base 9: mod_base = OTHER; note = 2'-fluoro uridine
  modified_base 10: mod_base = OTHER; note = 2'-O-methyl adenosine
  modified_base 11: mod_base = OTHER; note = 2'-fluoro adenosine
  modified_base 12: mod_base = OTHER; note = 2'-O-methyl cytosine
  modified_base 13: mod_base = OTHER; note = 2'-fluoro adenosine phosphorothioate
  modified_base 14: mod_base = OTHER; note = 2'-O-methyl cytosine phosphorothioate
  modified_base 15: mod_base = OTHER; note = 2'-fluoro adenosine triethylene glycol
gtaagaaataacaca

SEQ ID NO: 356 - RNA, 15 nt, synthetic construct
  source 1..15: mol_type = other RNA
  modified_base 1: mod_base = OTHER; note = 2'-fluoro cytosine phosphorothioate
  modified_base 2: mod_base = OTHER; note = 2'-O-methyl adenosine phosphorothioate
  modified_base 3: mod_base = OTHER; note = 2'-fluoro cytosine
  modified_base 4: mod_base = OTHER; note = 2'-O-methyl uridine
  modified_base 5: mod_base = OTHER; note = 2'-fluoro guanosine
  modified_base 6: mod_base = OTHER; note = 2'-O-methyl uridine
  modified_base 7: mod_base = OTHER; note = 2'-fluoro guanosine
  modified_base 8: mod_base = OTHER; note = 2'-O-methyl adenosine
  modified_base 9: mod_base = OTHER; note = 2'-fluoro adenosine
  modified_base 10: mod_base = OTHER; note = 2'-O-methyl uridine
  modified_base 11: mod_base = OTHER; note = 2'-fluoro guanosine
  modified_base 12: mod_base = OTHER; note = 2'-O-methyl uridine
  modified_base 13: mod_base = OTHER; note = 2'-fluoro adenosine phosphorothioate
  modified_base 14: mod_base = OTHER; note = 2'-O-methyl adenosine phosphorothioate
  modified_base 15: mod_base = OTHER; note = 2'-fluoro adenosine triethylene glycol
cactgtgaatgtaaa

SEQ ID NO: 357 - RNA, 15 nt, synthetic construct
  source 1..15: mol_type = other RNA
  modified_base 1: mod_base = OTHER; note = 2'-fluoro guanosine phosphorothioate
  modified_base 2: mod_base = OTHER; note = 2'-O-methyl adenosine phosphorothioate
  modified_base 3: mod_base = OTHER; note = 2'-fluoro guanosine
  modified_base 4: mod_base = OTHER; note = 2'-O-methyl cytosine
  modified_base 5: mod_base = OTHER; note = 2'-fluoro uridine
  modified_base 6: mod_base = OTHER; note = 2'-O-methyl cytosine
  modified_base 7: mod_base = OTHER; note = 2'-fluoro adenosine
  modified_base 8: mod_base = OTHER; note = 2'-O-methyl uridine
  modified_base 9: mod_base = OTHER; note = 2'-fluoro uridine
  modified_base 10: mod_base = OTHER; note = 2'-O-methyl adenosine
  modified_base 11: mod_base = OTHER; note = 2'-fluoro guanosine
  modified_base 12: mod_base = OTHER; note = 2'-O-methyl uridine
  modified_base 13: mod_base = OTHER; note = 2'-fluoro adenosine phosphorothioate
  modified_base 14: mod_base = OTHER; note = 2'-O-methyl adenosine phosphorothioate
  modified_base 15: mod_base = OTHER; note = 2'-fluoro adenosine triethylene glycol
gagctcattagtaaa

SEQ ID NO: 358 - RNA, 15 nt, synthetic construct
  source 1..15: mol_type = other RNA
  modified_base 1: mod_base = OTHER; note = 2'-fluoro cytosine phosphorothioate
  modified_base 2: mod_base = OTHER; note = 2'-O-methyl adenosine phosphorothioate
  modified_base 3: mod_base = OTHER; note = 2'-fluoro cytosine
  modified_base 4: mod_base = OTHER; note = 2'-O-methyl guanosine
  modified_base 5: mod_base = OTHER; note = 2'-fluoro cytosine
  modified_base 6: mod_base = OTHER; note = 2'-O-methyl adenosine
  modified_base 7: mod_base = OTHER; note = 2'-fluoro uridine
  modified_base 8: mod_base = OTHER; note = 2'-O-methyl adenosine
  modified_base 9: mod_base = OTHER; note = 2'-fluoro uridine
  modified_base 10: mod_base = OTHER; note = 2'-O-methyl adenosine
  modified_base 11: mod_base = OTHER; note = 2'-fluoro cytosine
  modified_base 12: mod_base = OTHER; note = 2'-O-methyl adenosine
  modified_base 13: mod_base = OTHER; note = 2'-fluoro uridine phosphorothioate
  modified_base 14: mod_base = OTHER; note = 2'-O-methyl adenosine phosphorothioate
  modified_base 15: mod_base = OTHER; note = 2'-fluoro adenosine triethylene glycol
cacgcatatacataa

SEQ ID NO: 359 - RNA, 15 nt, synthetic construct
  source 1..15: mol_type = other RNA
  modified_base 1: mod_base = OTHER; note = 2'-fluoro guanosine phosphorothioate
  modified_base 2: mod_base = OTHER; note = 2'-O-methyl adenosine phosphorothioate
  modified_base 3: mod_base = OTHER; note = 2'-fluoro cytosine
  modified_base 4: mod_base = OTHER; note = 2'-O-methyl adenosine
  modified_base 5: mod_base = OTHER; note = 2'-fluoro cytosine
  modified_base 6: mod_base = OTHER; note = 2'-O-methyl adenosine
  modified_base 7: mod_base = OTHER; note = 2'-fluoro uridine
  modified_base 8: mod_base = OTHER; note = 2'-O-methyl cytosine
  modified_base 9: mod_base = OTHER; note = 2'-fluoro uridine
  modified_base 10: mod_base = OTHER; note = 2'-O-methyl adenosine
  modified_base 11: mod_base = OTHER; note = 2'-fluoro uridine
  modified_base 12: mod_base = OTHER; note = 2'-O-methyl adenosine
  modified_base 13: mod_base = OTHER; note = 2'-fluoro adenosine phosphorothioate
  modified_base 14: mod_base = OTHER; note = 2'-O-methyl uridine phosphorothioate
  modified_base 15: mod_base = OTHER; note = 2'-fluoro adenosine triethylene glycol
gacacatctataata

SEQ ID NO: 360 - RNA, 15 nt, synthetic construct
  source 1..15: mol_type = other RNA
  modified_base 1: mod_base = OTHER; note = 2'-fluoro cytosine phosphorothioate
  modified_base 2: mod_base = OTHER; note = 2'-O-methyl adenosine phosphorothioate
  modified_base 3: mod_base = OTHER; note = 2'-fluoro cytosine
  modified_base 4: mod_base = OTHER; note = 2'-O-methyl adenosine
  modified_base 5: mod_base = OTHER; note = 2'-fluoro cytosine
  modified_base 6: mod_base = OTHER; note = 2'-O-methyl adenosine
  modified_base 7: mod_base = OTHER; note = 2'-fluoro cytosine
  modified_base 8: mod_base = OTHER; note = 2'-O-methyl cytosine
  modified_base 9: mod_base = OTHER; note = 2'-fluoro uridine
  modified_base 10: mod_base = OTHER; note = 2'-O-methyl cytosine
  modified_base 11: mod_base = OTHER; note = 2'-fluoro uridine
  modified_base 12: mod_base = OTHER; note = 2'-O-methyl cytosine
  modified_base 13: mod_base = OTHER; note = 2'-fluoro adenosine phosphorothioate
  modified_base 14: mod_base = OTHER; note = 2'-O-methyl adenosine phosphorothioate
  modified_base 15: mod_base = OTHER; note = 2'-fluoro adenosine triethylene glycol
cacacacctctcaaa

SEQ ID NO: 361 - RNA, 15 nt, synthetic construct
  source 1..15: mol_type = other RNA
  modified_base 1: mod_base = OTHER; note = 2'-fluoro uridine phosphorothioate
  modified_base 2: mod_base = OTHER; note = 2'-O-methyl adenosine phosphorothioate
  modified_base 3: mod_base = OTHER; note = 2'-fluoro uridine
  modified_base 4: mod_base = OTHER; note = 2'-O-methyl cytosine
  modified_base 5: mod_base = OTHER; note = 2'-fluoro adenosine
  modified_base 6: mod_base = OTHER; note = 2'-O-methyl uridine
  modified_base 7: mod_base = OTHER; note = 2'-fluoro guanosine
  modified_base 8: mod_base = OTHER; note = 2'-O-methyl uridine
  modified_base 9: mod_base = OTHER; note = 2'-fluoro uridine
  modified_base 10: mod_base = OTHER; note = 2'-O-methyl cytosine
  modified_base 11: mod_base = OTHER; note = 2'-fluoro cytosine
  modified_base 12: mod_base = OTHER; note = 2'-O-methyl uridine
  modified_base 13: mod_base = OTHER; note = 2'-fluoro adenosine phosphorothioate
  modified_base 14: mod_base = OTHER; note = 2'-O-methyl adenosine phosphorothioate
  modified_base 15: mod_base = OTHER; note = 2'-fluoro adenosine triethylene glycol
tatcatgttcctaaa

SEQ ID NO: 362 - RNA, 15 nt, synthetic construct
  source 1..15: mol_type = other RNA
  modified_base 1: mod_base = OTHER; note = 2'-fluoro guanosine phosphorothioate
  modified_base 2: mod_base = OTHER; note = 2'-O-methyl cytosine phosphorothioate
  modified_base 3: mod_base = OTHER; note = 2'-fluoro adenosine
  modified_base 4: mod_base = OTHER; note = 2'-O-methyl adenosine
  modified_base 5: mod_base = OTHER; note = 2'-fluoro adenosine
  modified_base 6: mod_base = OTHER; note = 2'-O-methyl uridine
  modified_base 7: mod_base = OTHER; note = 2'-fluoro guanosine
  modified_base 8: mod_base = OTHER; note = 2'-O-methyl uridine
  modified_base 9: mod_base = OTHER; note = 2'-fluoro guanosine
  modified_base 10: mod_base = OTHER; note = 2'-O-methyl adenosine
  modified_base 11: mod_base = OTHER; note = 2'-fluoro uridine
  modified_base 12: mod_base = OTHER; note = 2'-O-methyl uridine
  modified_base 13: mod_base = OTHER; note = 2'-fluoro adenosine phosphorothioate
  modified_base 14: mod_base = OTHER; note = 2'-O-methyl adenosine phosphorothioate
  modified_base 15: mod_base = OTHER; note = 2'-fluoro adenosine triethylene glycol
gcaaatgtgattaaa

SEQ ID NO: 363 - RNA, 15 nt, synthetic construct
  source 1..15: mol_type = other RNA
  modified_base 1: mod_base = OTHER; note = 2'-fluoro uridine phosphorothioate
  modified_base 2: mod_base = OTHER; note = 2'-O-methyl guanosine phosphorothioate
  modified_base 3: mod_base = OTHER; note = 2'-fluoro uridine
  modified_base 4: mod_base = OTHER; note = 2'-O-methyl guanosine
  modified_base 5: mod_base = OTHER; note = 2'-fluoro adenosine
  modified_base 6: mod_base = OTHER; note = 2'-O-methyl uridine
  modified_base 7: mod_base = OTHER; note = 2'-fluoro uridine
  modified_base 8: mod_base = OTHER; note = 2'-O-methyl adenosine
  modified_base 9: mod_base = OTHER; note = 2'-fluoro adenosine
  modified_base 10: mod_base = OTHER; note = 2'-O-methyl uridine
  modified_base 11: mod_base = OTHER; note = 2'-fluoro uridine
  modified_base 12: mod_base = OTHER; note = 2'-O-methyl uridine
  modified_base 13: mod_base = OTHER; note = 2'-fluoro guanosine phosphorothioate
  modified_base 14: mod_base = OTHER; note = 2'-O-methyl guanosine phosphorothioate
  modified_base 15: mod_base = OTHER; note = 2'-fluoro adenosine triethylene glycol
tgtgattaatttgga

SEQ ID NO: 364 - RNA, 15 nt, synthetic construct
  source 1..15: mol_type = other RNA
  modified_base 1: mod_base = OTHER; note = 2'-fluoro guanosine phosphorothioate
  modified_base 2: mod_base = OTHER; note = 2'-O-methyl guanosine phosphorothioate
  modified_base 3: mod_base = OTHER; note = 2'-fluoro uridine
  modified_base 4: mod_base = OTHER; note = 2'-O-methyl uridine
  modified_base 5: mod_base = OTHER; note = 2'-fluoro guanosine
  modified_base 6: mod_base = OTHER; note = 2'-O-methyl uridine
  modified_base 7: mod_base = OTHER; note = 2'-fluoro cytosine
  modified_base 8: mod_base = OTHER; note = 2'-O-methyl adenosine
  modified_base 9: mod_base = OTHER; note = 2'-fluoro adenosine
  modified_base 10: mod_base = OTHER; note = 2'-O-methyl guanosine
  modified_base 11: mod_base = OTHER; note = 2'-fluoro uridine
  modified_base 12: mod_base = OTHER; note = 2'-O-methyl uridine
  modified_base 13: mod_base = OTHER; note = 2'-fluoro uridine phosphorothioate
  modified_base 14: mod_base = OTHER; note = 2'-O-methyl uridine phosphorothioate
  modified_base 15: mod_base = OTHER; note = 2'-fluoro adenosine triethylene glycol
ggttgtcaagtttta

SEQ ID NO: 365 - RNA, 15 nt, synthetic construct
  source 1..15: mol_type = other RNA
  modified_base 1: mod_base = OTHER; note = 2'-fluoro uridine phosphorothioate
  modified_base 2: mod_base = OTHER; note = 2'-O-methyl uridine phosphorothioate
  modified_base 3: mod_base = OTHER; note = 2'-fluoro uridine
  modified_base 4: mod_base = OTHER; note = 2'-O-methyl cytosine
  modified_base 5: mod_base = OTHER; note = 2'-fluoro cytosine
  modified_base 6: mod_base = OTHER; note = 2'-O-methyl uridine
  modified_base 7: mod_base = OTHER; note = 2'-fluoro guanosine
  modified_base 8: mod_base = OTHER; note = 2'-O-methyl cytosine
  modified_base 9: mod_base = OTHER; note = 2'-fluoro uridine
  modified_base 10: mod_base = OTHER; note = 2'-O-methyl guanosine
  modified_base 11: mod_base = OTHER; note = 2'-fluoro guanosine
  modified_base 12: mod_base = OTHER; note = 2'-O-methyl uridine
  modified_base 13: mod_base = OTHER; note = 2'-fluoro adenosine phosphorothioate
  modified_base 14: mod_base = OTHER; note = 2'-O-methyl adenosine phosphorothioate
  modified_base 15: mod_base = OTHER; note = 2'-fluoro adenosine triethylene glycol
tttcctgctggtaaa

SEQ ID NO: 366 - RNA, 15 nt, synthetic construct
  source 1..15: mol_type = other RNA
  modified_base 1: mod_base = OTHER; note = 2'-fluoro cytosine phosphorothioate
  modified_base 2: mod_base = OTHER; note = 2'-O-methyl cytosine phosphorothioate
  modified_base 3: mod_base = OTHER; note = 2'-fluoro uridine
  modified_base 4: mod_base = OTHER; note = 2'-O-methyl guanosine
  modified_base 5: mod_base = OTHER; note = 2'-fluoro cytosine
  modified_base 6: mod_base = OTHER; note = 2'-O-methyl uridine
  modified_base 7: mod_base = OTHER; note = 2'-fluoro guanosine
  modified_base 8: mod_base = OTHER; note = 2'-O-methyl guanosine
  modified_base 9: mod_base = OTHER; note = 2'-fluoro uridine
  modified_base 10: mod_base = OTHER; note = 2'-O-methyl adenosine
  modified_base 11: mod_base = OTHER; note = 2'-fluoro adenosine
  modified_base 12: mod_base = OTHER; note = 2'-O-methyl uridine
  modified_base 13: mod_base = OTHER; note = 2'-fluoro adenosine phosphorothioate
  modified_base 14: mod_base = OTHER; note = 2'-O-methyl uridine phosphorothioate
  modified_base 15: mod_base = OTHER; note = 2'-fluoro adenosine triethylene glycol
cctgctggtaatata

SEQ ID NO: 367 - RNA, 15 nt, synthetic construct
  source 1..15: mol_type = other RNA
  modified_base 1: mod_base = OTHER; note = 2'-fluoro guanosine phosphorothioate
  modified_base 2: mod_base = OTHER; note = 2'-O-methyl guanosine phosphorothioate
  modified_base 3: mod_base = OTHER; note = 2'-fluoro guanosine
  modified_base 4: mod_base = OTHER; note = 2'-O-methyl adenosine
  modified_base 5: mod_base = OTHER; note = 2'-fluoro adenosine
  modified_base 6: mod_base = OTHER; note = 2'-O-methyl adenosine
  modified_base 7: mod_base = OTHER; note = 2'-fluoro guanosine
  modified_base 8: mod_base = OTHER; note = 2'-O-methyl adenosine
  modified_base 9: mod_base = OTHER; note = 2'-fluoro uridine
  modified_base 10: mod_base = OTHER; note = 2'-O-methyl uridine
  modified_base 11: mod_base = OTHER; note = 2'-fluoro uridine
  modified_base 12: mod_base = OTHER; note = 2'-O-methyl uridine
  modified_base 13: mod_base = OTHER; note = 2'-fluoro adenosine phosphorothioate
  modified_base 14: mod_base = OTHER; note = 2'-O-methyl adenosine phosphorothioate
  modified_base 15: mod_base = OTHER; note = 2'-fluoro adenosine triethylene glycol
gggaaagattttaaa

SEQ ID NO: 368 - RNA, 15 nt, synthetic construct
  source 1..15: mol_type = other RNA
  modified_base 1: mod_base = OTHER; note = 2'-fluoro adenosine phosphorothioate
  modified_base 2: mod_base = OTHER; note = 2'-O-methyl adenosine phosphorothioate
  modified_base 3: mod_base = OTHER; note = 2'-fluoro uridine
  modified_base 4: mod_base = OTHER; note = 2'-O-methyl guanosine
  modified_base 5: mod_base = OTHER; note = 2'-fluoro adenosine
  modified_base 6: mod_base = OTHER; note = 2'-O-methyl adenosine
  modified_base 7: mod_base = OTHER; note = 2'-fluoro adenosine
  modified_base 8: mod_base = OTHER; note = 2'-O-methyl cytosine
  modified_base 9: mod_base = OTHER; note = 2'-fluoro cytosine
  modified_base 10: mod_base = OTHER; note = 2'-O-methyl adenosine
  modified_base 11: mod_base = OTHER; note = 2'-fluoro guanosine
  modified_base 12: mod_base = OTHER; note = 2'-O-methyl guanosine
  modified_base 13: mod_base = OTHER; note = 2'-fluoro guanosine phosphorothioate
  modified_base 14: mod_base = OTHER; note = 2'-O-methyl uridine phosphorothioate
  modified_base 15: mod_base = OTHER; note = 2'-fluoro adenosine triethylene glycol
aatgaaaccagggta

SEQ ID NO: 369 - RNA, 15 nt, synthetic construct
  source 1..15: mol_type = other RNA
  modified_base 1: mod_base = OTHER; note = 2'-fluoro adenosine phosphorothioate
  modified_base 2: mod_base = OTHER; note = 2'-O-methyl adenosine phosphorothioate
  modified_base 3: mod_base = OTHER; note = 2'-fluoro adenosine
  modified_base 4: mod_base = OTHER; note = 2'-O-methyl cytosine
  modified_base 5: mod_base = OTHER; note = 2'-fluoro cytosine
  modified_base 6: mod_base = OTHER; note = 2'-O-methyl adenosine
  modified_base 7: mod_base = OTHER; note = 2'-fluoro guanosine
  modified_base 8: mod_base = OTHER; note = 2'-O-methyl guanosine
  modified_base 9: mod_base = OTHER; note = 2'-fluoro guanosine
  modified_base 10: mod_base = OTHER; note = 2'-O-methyl uridine
  modified_base 11: mod_base = OTHER; note = 2'-fluoro adenosine
  modified_base 12: mod_base = OTHER; note = 2'-O-methyl guanosine
  modified_base 13: mod_base = OTHER; note = 2'-fluoro adenosine phosphorothioate
  modified_base 14: mod_base = OTHER; note = 2'-O-methyl adenosine phosphorothioate
  modified_base 15: mod_base = OTHER; note = 2'-fluoro adenosine triethylene glycol
aaaccagggtagaaa

SEQ ID NO: 370 - RNA, 15 nt, synthetic construct
  source 1..15: mol_type = other RNA
  modified_base 1: mod_base = OTHER; note = 2'-fluoro uridine phosphorothioate
  modified_base 2: mod_base = OTHER; note = 2'-O-methyl uridine phosphorothioate
  modified_base 3: mod_base = OTHER; note = 2'-fluoro guanosine
  modified_base 4: mod_base = OTHER; note = 2'-O-methyl guanosine
  modified_base 5: mod_base = OTHER; note = 2'-fluoro cytosine
  modified_base 6: mod_base = OTHER; note = 2'-O-methyl adenosine
  modified_base 7: mod_base = OTHER; note = 2'-fluoro adenosine
  modified_base 8: mod_base = OTHER; note = 2'-O-methyl uridine
  modified_base 9: mod_base = OTHER; note = 2'-fluoro guanosine
  modified_base 10: mod_base = OTHER; note = 2'-O-methyl cytosine
  modified_base 11: mod_base = OTHER; note = 2'-fluoro adenosine
  modified_base 12: mod_base = OTHER; note = 2'-O-methyl cytosine
  modified_base 13: mod_base = OTHER; note = 2'-fluoro uridine phosphorothioate
  modified_base 14: mod_base = OTHER; note = 2'-O-methyl guanosine phosphorothioate
  modified_base 15: mod_base = OTHER; note = 2'-fluoro adenosine triethylene glycol
ttggcaatgcactga

SEQ ID NO: 371 - RNA, 15 nt, synthetic construct
  source 1..15: mol_type = other RNA
  modified_base 1: mod_base = OTHER; note = 2'-fluoro cytosine phosphorothioate
  modified_base 2: mod_base = OTHER; note = 2'-O-methyl adenosine phosphorothioate
  modified_base 3: mod_base = OTHER; note = 2'-fluoro guanosine
  modified_base 4: mod_base = OTHER; note = 2'-O-methyl uridine
  modified_base 5: mod_base = OTHER; note = 2'-fluoro uridine
  modified_base 6: mod_base = OTHER; note = 2'-O-methyl guanosine
  modified_base 7: mod_base = OTHER; note = 2'-fluoro uridine
  modified_base 8: mod_base = OTHER; note = 2'-O-methyl uridine
  modified_base 9: mod_base = OTHER; note = 2'-fluoro uridine
  modified_base 10: mod_base = OTHER; note = 2'-O-methyl cytosine
  modified_base 11: mod_base = OTHER; note = 2'-fluoro uridine
  modified_base 12: mod_base = OTHER; note = 2'-O-methyl adenosine
  modified_base 13: mod_base = OTHER; note = 2'-fluoro adenosine phosphorothioate
  modified_base 14: mod_base = OTHER; note = 2'-O-methyl guanosine phosphorothioate
  modified_base 15: mod_base = OTHER; note = 2'-fluoro adenosine triethylene glycol
cagttgtttctaaga

SEQ ID NO: 372 - RNA, 15 nt, synthetic construct
  source 1..15: mol_type = other RNA
  modified_base 1: mod_base = OTHER; note = 2'-fluoro guanosine phosphorothioate
  modified_base 2: mod_base = OTHER; note = 2'-O-methyl adenosine phosphorothioate
  modified_base 3: mod_base = OTHER; note = 2'-fluoro cytosine
  modified_base 4: mod_base = OTHER; note = 2'-O-methyl guanosine
  modified_base 5: mod_base = OTHER; note = 2'-fluoro adenosine
  modified_base 6: mod_base = OTHER; note = 2'-O-methyl guanosine
  modified_base 7: mod_base = OTHER; note = 2'-fluoro adenosine
  modified_base 8: mod_base = OTHER; note = 2'-O-methyl guanosine
  modified_base 9: mod_base = OTHER; note = 2'-fluoro adenosine
  modified_base 10: mod_base = OTHER; note = 2'-O-methyl uridine
  modified_base 11: mod_base = OTHER; note = 2'-fluoro guanosine
  modified_base 12: mod_base = OTHER; note = 2'-O-methyl uridine
  modified_base 13: mod_base = OTHER; note = 2'-fluoro adenosine phosphorothioate
  modified_base 14: mod_base = OTHER; note = 2'-O-methyl uridine phosphorothioate
  modified_base 15: mod_base = OTHER; note = 2'-fluoro adenosine triethylene glycol
gacgagagatgtata

SEQ ID NO: 373 - RNA, 15 nt, synthetic construct
  source 1..15: mol_type = other RNA
  modified_base 1: mod_base = OTHER; note = 2'-fluoro guanosine phosphorothioate
  modified_base 2: mod_base = OTHER; note = 2'-O-methyl adenosine phosphorothioate
  modified_base 3: mod_base = OTHER; note = 2'-fluoro guanosine
  modified_base 4: mod_base = OTHER; note = 2'-O-methyl adenosine
  modified_base 5: mod_base = OTHER; note = 2'-fluoro uridine
  modified_base 6: mod_base = OTHER; note = 2'-O-methyl guanosine
  modified_base 7: mod_base = OTHER; note = 2'-fluoro uridine
  modified_base 8: mod_base = OTHER; note = 2'-O-methyl adenosine
  modified_base 9: mod_base = OTHER; note = 2'-fluoro uridine
  modified_base 10: mod_base = OTHER; note = 2'-O-methyl adenosine
  modified_base 11: mod_base = OTHER; note = 2'-fluoro uridine
  modified_base 12: mod_base = OTHER; note = 2'-O-methyl uridine
  modified_base 13: mod_base = OTHER; note = 2'-fluoro uridine phosphorothioate
  modified_base 14: mod_base = OTHER; note = 2'-O-methyl adenosine phosphorothioate
  modified_base 15: mod_base = OTHER; note = 2'-fluoro adenosine triethylene glycol
gagatgtatatttaa

SEQ ID NO: 374 - RNA, 15 nt, synthetic construct
  source 1..15: mol_type = other RNA
  modified_base 1: mod_base = OTHER; note = 2'-fluoro uridine phosphorothioate
  modified_base 2: mod_base = OTHER; note = 2'-O-methyl adenosine phosphorothioate
  modified_base 3: mod_base = OTHER; note = 2'-fluoro adenosine
  modified_base 4: mod_base = OTHER; note = 2'-O-methyl cytosine
  modified_base 5: mod_base = OTHER; note = 2'-fluoro uridine
  modified_base 6: mod_base = OTHER; note = 2'-O-methyl guanosine
  modified_base 7: mod_base = OTHER; note = 2'-fluoro cytosine
  modified_base 8: mod_base = OTHER; note = 2'-O-methyl uridine
  modified_base 9: mod_base = OTHER; note = 2'-fluoro guanosine
  modified_base 10: mod_base = OTHER; note = 2'-O-methyl cytosine
  modified_base 11: mod_base = OTHER; note = 2'-fluoro adenosine
  modified_base 12: mod_base = OTHER; note = 2'-O-methyl adenosine
  modified_base 13: mod_base = OTHER; note = 2'-fluoro adenosine phosphorothioate
  modified_base 14: mod_base = OTHER; note = 2'-O-methyl cytosine phosphorothioate
  modified_base 15: mod_base = OTHER; note = 2'-fluoro adenosine triethylene glycol
taactgctgcaaaca

SEQ ID NO: 375 - RNA, 15 nt, synthetic construct
  source 1..15: mol_type = other RNA
  modified_base 1: mod_base = OTHER; note = 2'-fluoro guanosine phosphorothioate
  modified_base 2: mod_base = OTHER; note = 2'-O-methyl cytosine phosphorothioate
  modified_base 3: mod_base = OTHER; note = 2'-fluoro uridine
  modified_base 4: mod_base = OTHER; note = 2'-O-methyl guanosine
  modified_base 5: mod_base = OTHER; note = 2'-fluoro cytosine
  modified_base 6: mod_base = OTHER; note = 2'-O-methyl adenosine
  modified_base 7: mod_base = OTHER; note = 2'-fluoro adenosine
  modified_base 8: mod_base = OTHER; note = 2'-O-methyl adenosine
  modified_base 9: mod_base = OTHER; note = 2'-fluoro cytosine
  modified_base 10: mod_base = OTHER; note = 2'-O-methyl adenosine
  modified_base 11: mod_base = OTHER; note = 2'-fluoro uridine
  modified_base 12: mod_base = OTHER; note = 2'-O-methyl uridine
  modified_base 13: mod_base = OTHER; note = 2'-fluoro guanosine phosphorothioate
  modified_base 14: mod_base = OTHER; note = 2'-O-methyl uridine phosphorothioate
  modified_base 15: mod_base = OTHER; note = 2'-fluoro adenosine triethylene glycol
gctgcaaacattgta

SEQ ID NO: 376 - RNA, 20 nt, synthetic construct
  source 1..20: mol_type = other RNA
  modified_base 1: mod_base = OTHER; note = 5' phosphate 2'-O-methyl uridine phosphorothioate
  modified_base 2: mod_base = OTHER; note = 2'-fluoro uridine phosphorothioate
  modified_base 3: mod_base = OTHER; note = 2'-O-methyl uridine
  modified_base 4: mod_base = OTHER; note = 2'-fluoro uridine
  modified_base 5: mod_base = OTHER; note = 2'-fluoro cytosine
  modified_base 6: mod_base = OTHER; note = 2'-fluoro uridine
  modified_base 7: mod_base = OTHER; note = 2'-O-methyl uridine
  modified_base 8: mod_base = OTHER; note = 2'-fluoro guanosine
  modified_base 9: mod_base = OTHER; note = 2'-O-methyl guanosine
  modified_base 10: mod_base = OTHER; note = 2'-fluoro uridine
  modified_base 11: mod_base = OTHER; note = 2'-O-methyl guanosine
  modified_base 12: mod_base = OTHER; note = 2'-fluoro guanosine
  modified_base 13: mod_base = OTHER; note = 2'-O-methyl cytosine phosphorothioate
  modified_base 14: mod_base = OTHER; note = 2'-fluoro uridine phosphorothioate
  modified_base 15: mod_base = OTHER; note = 2'-O-methyl guanosine phosphorothioate
  modified_base 16: mod_base = OTHER; note = 2'-fluoro adenosine phosphorothioate
  modified_base 17: mod_base = OTHER; note = 2'-O-methyl guanosine phosphorothioate
  modified_base 18: mod_base = OTHER; note = 2'-O-methyl adenosine phosphorothioate
  modified_base 19: mod_base = OTHER; note = 2'-O-methyl guanosine phosphorothioate
  modified_base 20: mod_base = OTHER; note = 2'-fluoro cytosine
ttttcttggtggctgagagc

SEQ ID NO: 377 - RNA, 20 nt, synthetic construct
  source 1..20: mol_type = other RNA
  modified_base 1: mod_base = OTHER; note = 5' phosphate 2'-O-methyl uridine phosphorothioate
  modified_base 2: mod_base = OTHER; note = 2'-fluoro uridine phosphorothioate
  modified_base 3: mod_base = OTHER; note = 2'-O-methyl uridine
  modified_base 4: mod_base = OTHER; note = 2'-fluoro cytosine
  modified_base 5: mod_base = OTHER; note = 2'-fluoro adenosine
  modified_base 6: mod_base = OTHER; note = 2'-fluoro guanosine
  modified_base 7: mod_base = OTHER; note = 2'-O-methyl adenosine
  modified_base 8: mod_base = OTHER; note = 2'-fluoro adenosine
  modified_base 9: mod_base = OTHER; note = 2'-O-methyl cytosine
  modified_base 10: mod_base = OTHER; note = 2'-fluoro uridine
  modified_base 11: mod_base = OTHER; note = 2'-O-methyl guanosine
  modified_base 12: mod_base = OTHER; note = 2'-fluoro uridine
  modified_base 13: mod_base = OTHER; note = 2'-O-methyl cytosine phosphorothioate
  modified_base 14: mod_base = OTHER; note = 2'-fluoro guanosine phosphorothioate
  modified_base 15: mod_base = OTHER; note = 2'-O-methyl guanosine phosphorothioate
  modified_base 16: mod_base = OTHER; note = 2'-fluoro adenosine phosphorothioate
  modified_base 17: mod_base = OTHER; note = 2'-O-methyl adenosine phosphorothioate
  modified_base 18: mod_base = OTHER; note = 2'-O-methyl guanosine phosphorothioate
  modified_base 19: mod_base = OTHER; note = 2'-O-methyl guanosine phosphorothioate
  modified_base 20: mod_base = OTHER; note = 2'-fluoro guanosine
tttcagaactgtcggaaggg

SEQ ID NO: 378 - RNA, 20 nt, synthetic construct
  source 1..20: mol_type = other RNA
  modified_base 1: mod_base = OTHER; note = 5' phosphate 2'-O-methyl uridine phosphorothioate
  modified_base 2: mod_base = OTHER; note = 2'-fluoro uridine phosphorothioate
  modified_base 3: mod_base = OTHER; note = 2'-O-methyl uridine
  modified_base 4: mod_base = OTHER; note = 2'-fluoro cytosine
  modified_base 5: mod_base = OTHER; note = 2'-fluoro cytosine
  modified_base 6: mod_base = OTHER; note = 2'-fluoro uridine
  modified_base 7: mod_base = OTHER; note = 2'-O-methyl guanosine
  modified_base 8: mod_base = OTHER; note = 2'-fluoro uridine
  modified_base 9: mod_base = OTHER; note = 2'-O-methyl guanosine
  modified_base 10: mod_base = OTHER; note = 2'-fluoro uridine
  modified_base 11: mod_base = OTHER; note = 2'-O-methyl adenosine
  modified_base 12: mod_base = OTHER; note = 2'-fluoro cytosine
  modified_base 13: mod_base = OTHER; note = 2'-O-methyl adenosine phosphorothioate
  modified_base 14: mod_base = OTHER; note = 2'-fluoro uridine phosphorothioate
  modified_base 15: mod_base = OTHER; note = 2'-O-methyl guanosine phosphorothioate
  modified_base 16: mod_base = OTHER; note = 2'-fluoro cytosine phosphorothioate
  modified_base 17: mod_base = OTHER; note = 2'-O-methyl adenosine phosphorothioate
  modified_base 18: mod_base = OTHER; note = 2'-O-methyl guanosine phosphorothioate
  modified_base 19: mod_base = OTHER; note = 2'-O-methyl guanosine phosphorothioate
  modified_base 20: mod_base = OTHER; note = 2'-fluoro uridine
tttcctgtgtacatgcaggt

SEQ ID NO: 379 - RNA, 20 nt, synthetic construct
  source 1..20: mol_type = other RNA
  modified_base 1: mod_base = OTHER; note = 5' phosphate 2'-O-methyl uridine phosphorothioate
  modified_base 2: mod_base = OTHER; note = 2'-fluoro uridine phosphorothioate
  modified_base 3: mod_base = OTHER; note = 2'-O-methyl uridine
  modified_base 4: mod_base = OTHER; note = 2'-fluoro cytosine
  modified_base 5: mod_base = OTHER; note = 2'-fluoro cytosine
  modified_base 6: mod_base = OTHER; note = 2'-fluoro uridine
  modified_base 7: mod_base = OTHER; note = 2'-O-methyl uridine
  modified_base 8: mod_base = OTHER; note = 2'-fluoro guanosine
  modified_base 9: mod_base = OTHER; note = 2'-O-methyl uridine
  modified_base 10: mod_base = OTHER; note = 2'-fluoro adenosine
  modified_base 11: mod_base = OTHER; note = 2'-O-methyl guanosine
  modified_base 12: mod_base = OTHER; note = 2'-fluoro adenosine
  modified_base 13: mod_base = OTHER; note = 2'-O-methyl guanosine phosphorothioate
  modified_base 14: mod_base = OTHER; note = 2'-fluoro uridine phosphorothioate
  modified_base 15: mod_base = OTHER; note = 2'-O-methyl uridine phosphorothioate
  modified_base 16: mod_base = OTHER; note = 2'-fluoro cytosine phosphorothioate
  modified_base 17: mod_base = OTHER; note = 2'-O-methyl uridine phosphorothioate
  modified_base 18: mod_base = OTHER; note = 2'-O-methyl adenosine phosphorothioate
  modified_base 19: mod_base = OTHER; note = 2'-O-methyl guanosine phosphorothioate
  modified_base 20: mod_base = OTHER; note = 2'-fluoro cytosine
tttccttgtagagttctagc

SEQ ID NO: 380 - RNA, 20 nt, synthetic construct
  source 1..20: mol_type = other RNA
  modified_base 1: mod_base = OTHER; note = 5' phosphate 2'-O-methyl uridine phosphorothioate
  modified_base 2: mod_base = OTHER; note = 2'-fluoro guanosine phosphorothioate
  modified_base 3: mod_base = OTHER; note = 2'-O-methyl uridine
  modified_base 4: mod_base = OTHER; note = 2'-fluoro adenosine
  modified_base 5: mod_base = OTHER; note = 2'-fluoro cytosine
  modified_base 6: mod_base = OTHER; note = 2'-fluoro uridine
  modified_base 7: mod_base = OTHER; note = 2'-O-methyl guanosine
  modified_base 8: mod_base = OTHER; note = 2'-fluoro guanosine
  modified_base 9: mod_base = OTHER; note = 2'-O-methyl adenosine
  modified_base 10: mod_base = OTHER; note = 2'-fluoro uridine
  modified_base 11: mod_base = OTHER; note = 2'-O-methyl guanosine
  modified_base 12: mod_base = OTHER; note = 2'-fluoro adenosine
  modified_base 13: mod_base = OTHER; note = 2'-O-methyl guanosine phosphorothioate
  modified_base 14: mod_base = OTHER; note = 2'-fluoro uridine phosphorothioate
  modified_base 15: mod_base = OTHER; note = 2'-O-methyl cytosine phosphorothioate
  modified_base 16: mod_base = OTHER; note = 2'-fluoro uridine phosphorothioate
  modified_base 17: mod_base = OTHER; note = 2'-O-methyl cytosine phosphorothioate
  modified_base 18: mod_base = OTHER; note = 2'-O-methyl adenosine phosphorothioate
  modified_base 19: mod_base = OTHER; note = 2'-O-methyl guanosine phosphorothioate
  modified_base 20: mod_base = OTHER; note = 2'-fluoro cytosine
tgtactggatgagtctcagc

SEQ ID NO: 381 - RNA, 20 nt, synthetic construct
  source 1..20: mol_type = other RNA
  modified_base 1: mod_base = OTHER; note = 5' phosphate 2'-O-methyl uridine phosphorothioate
  modified_base 2: mod_base = OTHER; note = 2'-fluoro uridine phosphorothioate
  modified_base 3: mod_base = OTHER; note = 2'-O-methyl adenosine
  modified_base 4: mod_base = OTHER; note = 2'-fluoro adenosine
  modified_base 5: mod_base = OTHER; note = 2'-fluoro uridine
  modified_base 6: mod_base = OTHER; note = 2'-fluoro uridine
  modified_base 7: mod_base = OTHER; note = 2'-O-methyl uridine
  modified_base 8: mod_base = OTHER; note = 2'-fluoro cytosine
  modified_base 9: mod_base = OTHER; note = 2'-O-methyl cytosine
  modified_base 10: mod_base = OTHER; note = 2'-fluoro uridine
  modified_base 11: mod_base = OTHER; note = 2'-O-methyl uridine
  modified_base 12: mod_base = OTHER; note = 2'-fluoro guanosine
  modified_base 13: mod_base = OTHER; note = 2'-O-methyl uridine phosphorothioate
  modified_base 14: mod_base = OTHER; note = 2'-fluoro adenosine phosphorothioate
  modified_base 15: mod_base = OTHER; note = 2'-O-methyl guanosine phosphorothioate
  modified_base 16: mod_base = OTHER; note = 2'-fluoro adenosine phosphorothioate
  modified_base 17: mod_base = OTHER; note = 2'-O-methyl guanosine phosphorothioate
  modified_base 18: mod_base = OTHER; note = 2'-O-methyl uridine phosphorothioate
  modified_base 19: mod_base = OTHER; note = 2'-O-methyl uridine phosphorothioate
  modified_base 20: mod_base = OTHER; note = 2'-fluoro cytosine
ttaatttccttgtagagttc

SEQ ID NO: 382 - RNA, 20 nt, synthetic construct
  source 1..20: mol_type = other RNA
  modified_base 1: mod_base = OTHER; note = 5' phosphate 2'-O-methyl uridine phosphorothioate
  modified_base 2: mod_base = OTHER; note = 2'-fluoro guanosine phosphorothioate
  modified_base 3: mod_base = OTHER; note = 2'-O-methyl uridine
  modified_base 4: mod_base = OTHER; note = 2'-fluoro adenosine
  modified_base 5: mod_base = OTHER; note = 2'-fluoro uridine
  modified_base 6: mod_base = OTHER; note = 2'-fluoro uridine
  modified_base 7: mod_base = OTHER; note = 2'-O-methyl cytosine
  modified_base 8: mod_base = OTHER; note = 2'-fluoro adenosine
  modified_base 9: mod_base = OTHER; note = 2'-O-methyl adenosine
  modified_base 10: mod_base = OTHER; note = 2'-fluoro adenosine
  modified_base 11: mod_base = OTHER; note = 2'-O-methyl cytosine
  modified_base 12: mod_base = OTHER; note = 2'-fluoro uridine
  modified_base 13: mod_base = OTHER; note = 2'-O-methyl guanosine phosphorothioate
  modified_base 14: mod_base = OTHER; note = 2'-fluoro cytosine phosphorothioate
  modified_base 15: mod_base = OTHER; note = 2'-O-methyl uridine phosphorothioate
  modified_base 16: mod_base = OTHER; note = 2'-fluoro uridine phosphorothioate
  modified_base 17: mod_base = OTHER; note = 2'-O-methyl cytosine phosphorothioate
  modified_base 18: mod_base = OTHER; note = 2'-O-methyl adenosine phosphorothioate
  modified_base 19: mod_base = OTHER; note = 2'-O-methyl guanosine phosphorothioate
  modified_base 20: mod_base = OTHER; note = 2'-fluoro cytosine
tgtattcaaactgcttcagc

SEQ ID NO: 383 - RNA, 20 nt, synthetic construct
  source 1..20: mol_type = other RNA
  modified_base 1: mod_base = OTHER; note = 5' phosphate 2'-O-methyl uridine phosphorothioate
  modified_base 2: mod_base = OTHER; note = 2'-fluoro uridine phosphorothioate
  modified_base 3: mod_base = OTHER; note = 2'-O-methyl guanosine
  modified_base 4: mod_base = OTHER; note = 2'-fluoro uridine
  modified_base 5: mod_base = OTHER; note = 2'-fluoro adenosine
  modified_base 6: mod_base = OTHER; note = 2'-fluoro guanosine
  modified_base 7: mod_base = OTHER; note = 2'-O-methyl adenosine
  modified_base 8: mod_base = OTHER; note = 2'-fluoro guanosine
  modified_base 9: mod_base = OTHER; note = 2'-O-methyl uridine
  modified_base 10: mod_base = OTHER; note = 2'-fluoro uridine
  modified_base 11: mod_base = OTHER; note = 2'-O-methyl uridine
  modified_base 12: mod_base = OTHER; note = 2'-fluoro guanosine
  modified_base 13: mod_base = OTHER; note = 2'-O-methyl cytosine phosphorothioate
  modified_base 14: mod_base = OTHER; note = 2'-fluoro uridine phosphorothioate
  modified_base 15: mod_base = OTHER; note = 2'-O-methyl guanosine phosphorothioate
  modified_base 16: mod_base = OTHER; note = 2'-fluoro adenosine phosphorothioate
  modified_base 17: mod_base = OTHER; note = 2'-O-methyl adenosine phosphorothioate
  modified_base 18: mod_base = OTHER; note = 2'-O-methyl guanosine phosphorothioate
  modified_base 19: mod_base = OTHER; note = 2'-O-methyl adenosine phosphorothioate
  modified_base 20: mod_base = OTHER; note = 2'-fluoro adenosine
ttgtagagtttgctgaagaa

SEQ ID NO: 384 - RNA, 20 nt, synthetic construct
  source 1..20: mol_type = other RNA
  modified_base 1: mod_base = OTHER; note = 5' phosphate 2'-O-methyl uridine phosphorothioate
  modified_base 2: mod_base = OTHER; note = 2'-fluoro uridine phosphorothioate
  modified_base 3: mod_base = OTHER; note = 2'-O-methyl uridine
  modified_base 4: mod_base = OTHER; note = 2'-fluoro uridine
  modified_base 5: mod_base = OTHER; note = 2'-fluoro cytosine
  modified_base 6: mod_base = OTHER; note = 2'-fluoro uridine
  modified_base 7: mod_base = OTHER; note = 2'-O-methyl cytosine
  modified_base 8: mod_base = OTHER; note = 2'-fluoro cytosine
  modified_base 9: mod_base = OTHER; note = 2'-O-methyl uridine
  modified_base 10: mod_base = OTHER; note = 2'-fluoro uridine
  modified_base 11: mod_base = OTHER; note = 2'-O-methyl uridine
  modified_base 12: mod_base = OTHER; note = 2'-fluoro cytosine
  modified_base 13: mod_base = OTHER; note = 2'-O-methyl cytosine phosphorothioate
  modified_base 14: mod_base = OTHER; note = 2'-fluoro uridine phosphorothioate
  modified_base 15: mod_base = OTHER; note = 2'-O-methyl guanosine phosphorothioate
  modified_base 16: mod_base = OTHER; note = 2'-fluoro uridine phosphorothioate
  modified_base 17: mod_base = OTHER; note = 2'-O-methyl guanosine phosphorothioate
  modified_base 18: mod_base = OTHER; note = 2'-O-methyl uridine phosphorothioate
  modified_base 19: mod_base = OTHER; note = 2'-O-methyl adenosine phosphorothioate
  modified_base 20: mod_base = OTHER; note = 2'-fluoro cytosine
ttttctcctttcctgtgtac

SEQ ID NO: 385 - RNA, 20 nt, synthetic construct
  source 1..20: mol_type = other RNA
  modified_base 1: mod_base = OTHER; note = 5' phosphate 2'-O-methyl uridine phosphorothioate
  modified_base 2: mod_base = OTHER; note = 2'-fluoro uridine phosphorothioate
  modified_base 3: mod_base = OTHER; note = 2'-O-methyl uridine
  modified_base 4: mod_base = OTHER; note = 2'-fluoro cytosine
  modified_base 5: mod_base = OTHER; note = 2'-fluoro uridine
  modified_base 6: mod_base = OTHER; note = 2'-fluoro guanosine
  modified_base 7: mod_base = OTHER; note = 2'-O-methyl cytosine
  modified_base 8: mod_base = OTHER; note = 2'-fluoro adenosine
  modified_base 9: mod_base = OTHER; note = 2'-O-methyl guanosine
  modified_base 10: mod_base = OTHER; note = 2'-fluoro cytosine
  modified_base 11: mod_base = OTHER; note = 2'-O-methyl adenosine
  modified_base 12: mod_base = OTHER; note = 2'-fluoro guanosine
  modified_base 13: mod_base = OTHER; note = 2'-O-methyl guanosine phosphorothioate
  modified_base 14: mod_base = OTHER; note = 2'-fluoro guanosine phosphorothioate
  modified_base 15: mod_base = OTHER; note = 2'-O-methyl guanosine phosphorothioate
  modified_base 16: mod_base = OTHER; note = 2'-fluoro adenosine phosphorothioate
  modified_base 17: mod_base = OTHER; note = 2'-O-methyl adenosine phosphorothioate
  modified_base 18: mod_base = OTHER; note = 2'-O-methyl uridine phosphorothioate
  modified_base 19: mod_base = OTHER; note = 2'-O-methyl guanosine phosphorothioate
  modified_base 20: mod_base = OTHER; note = 2'-fluoro cytosine
tttctgcagcaggggaatgc

SEQ ID NO: 386 - RNA, 20 nt, synthetic construct
  source 1..20: mol_type = other RNA
  modified_base 1: mod_base = OTHER; note = 5' phosphate 2'-O-methyl uridine phosphorothioate
  modified_base 2: mod_base = OTHER; note = 2'-fluoro guanosine phosphorothioate
  modified_base 3: mod_base = OTHER; note = 2'-O-methyl uridine
  modified_base 4: mod_base = OTHER; note = 2'-fluoro guanosine
  modified_base 5: mod_base = OTHER; note = 2'-fluoro adenosine
  modified_base 6: mod_base = OTHER; note = 2'-fluoro uridine
  modified_base 7: mod_base = OTHER; note = 2'-O-methyl guanosine
  modified_base 8: mod_base = OTHER; note = 2'-fluoro cytosine
  modified_base 9: mod_base = OTHER; note = 2'-O-methyl uridine
  modified_base 10: mod_base = OTHER; note = 2'-fluoro uridine
  modified_base 11: mod_base = OTHER; note = 2'-O-methyl guanosine
  modified_base 12: mod_base = OTHER; note = 2'-fluoro guanosine
  modified_base 13: mod_base = OTHER; note = 2'-O-methyl uridine phosphorothioate
  modified_base 14: mod_base = OTHER; note = 2'-fluoro adenosine phosphorothioate
  modified_base 15: mod_base = OTHER; note = 2'-O-methyl guanosine phosphorothioate
  modified_base 16: mod_base = OTHER; note = 2'-fluoro cytosine phosphorothioate
  modified_base 17: mod_base = OTHER; note = 2'-O-methyl adenosine phosphorothioate
  modified_base 18: mod_base = OTHER; note = 2'-O-methyl guanosine phosphorothioate
  modified_base 19: mod_base = OTHER; note = 2'-O-methyl guanosine phosphorothioate
  modified_base 20: mod_base = OTHER; note = 2'-fluoro uridine
tgtgatgcttggtagcaggt

SEQ ID NO: 387 - RNA, 20 nt, synthetic construct
  source 1..20: mol_type = other RNA
  modified_base 1: mod_base = OTHER; note = 5' phosphate 2'-O-methyl uridine phosphorothioate
  modified_base 2: mod_base = OTHER; note = 2'-fluoro uridine phosphorothioate
  modified_base 3: mod_base = OTHER; note = 2'-O-methyl cytosine
  modified_base 4: mod_base = OTHER; note = 2'-fluoro guanosine
  modified_base 5: mod_base = OTHER; note = 2'-fluoro cytosine
  modified_base 6: mod_base = OTHER; note = 2'-fluoro adenosine
  modified_base 7: mod_base = OTHER; note = 2'-O-methyl adenosine
  modified_base 8: mod_base = OTHER; note = 2'-fluoro adenosine
  modified_base 9: mod_base = OTHER; note = 2'-O-methyl guanosine
  modified_base 10: mod_base = OTHER; note = 2'-fluoro uridine
  modified_base 11: mod_base = OTHER; note = 2'-O-methyl uridine
  modified_base 12: mod_base = OTHER; note = 2'-fluoro guanosine
  modified_base 13: mod_base = OTHER; note = 2'-O-methyl cytosine phosphorothioate
  modified_base 14: mod_base = OTHER; note = 2'-fluoro cytosine phosphorothioate
  modified_base 15: mod_base = OTHER; note = 2'-O-methyl adenosine phosphorothioate
  modified_base 16: mod_base = OTHER; note = 2'-fluoro adenosine phosphorothioate
  modified_base 17: mod_base = OTHER; note = 2'-O-methyl adenosine phosphorothioate
  modified_base 18: mod_base = OTHER; note = 2'-O-methyl adenosine phosphorothioate
  modified_base 19: mod_base = OTHER; note = 2'-O-methyl guanosine phosphorothioate
  modified_base 20: mod_base = OTHER; note = 2'-fluoro adenosine
ttcgcaaagttgccaaaaga

SEQ ID NO: 388 - RNA, 20 nt, synthetic construct
  source 1..20: mol_type = other RNA
  modified_base 1: mod_base = OTHER; note = 5' phosphate 2'-O-methyl uridine phosphorothioate
  modified_base 2: mod_base = OTHER; note = 2'-fluoro cytosine phosphorothioate
  modified_base 3: mod_base = OTHER; note = 2'-O-methyl uridine
  modified_base 4: mod_base = OTHER; note = 2'-fluoro uridine
  modified_base 5: mod_base = OTHER; note = 2'-fluoro guanosine
  modified_base 6: mod_base = OTHER; note = 2'-fluoro uridine
  modified_base 7: mod_base = OTHER; note = 2'-O-methyl cytosine
  modified_base 8: mod_base = OTHER; note = 2'-fluoro uridine
  modified_base 9: mod_base = OTHER; note = 2'-O-methyl guanosine
  modified_base 10: mod_base = OTHER; note = 2'-fluoro cytosine
  modified_base 11: mod_base = OTHER; note = 2'-O-methyl uridine
  modified_base 12: mod_base = OTHER; note = 2'-fluoro cytosine
  modified_base 13: mod_base = OTHER; note = 2'-O-methyl guanosine phosphorothioate
  modified_base 14: mod_base = OTHER; note = 2'-fluoro guanosine phosphorothioate
  modified_base 15: mod_base = OTHER; note = 2'-O-methyl uridine phosphorothioate
  modified_base 16: mod_base = OTHER; note = 2'-fluoro uridine phosphorothioate
  modified_base 17: mod_base = OTHER; note = 2'-O-methyl cytosine phosphorothioate
  modified_base 18: mod_base = OTHER; note = 2'-O-methyl uridine phosphorothioate
  modified_base 19: mod_base = OTHER; note = 2'-O-methyl uridine phosphorothioate
  modified_base 20: mod_base = OTHER; note = 2'-fluoro uridine
tcttgtctgctcggttcttt

SEQ ID NO: 389 - RNA, 20 nt, synthetic construct
  source 1..20: mol_type = other RNA
  modified_base 1: mod_base = OTHER; note = 5' phosphate 2'-O-methyl uridine phosphorothioate
  modified_base 2: mod_base = OTHER; note = 2'-fluoro adenosine phosphorothioate
  modified_base 3: mod_base = OTHER; note = 2'-O-methyl uridine
  modified_base 4: mod_base = OTHER; note = 2'-fluoro uridine
  modified_base 5: mod_base = OTHER; note = 2'-fluoro guanosine
  modified_base 6: mod_base = OTHER; note = 2'-fluoro uridine
  modified_base 7: mod_base = OTHER; note = 2'-O-methyl cytosine
  modified_base 8: mod_base = OTHER; note = 2'-fluoro guanosine
  modified_base 9: mod_base = OTHER; note = 2'-O-methyl uridine
  modified_base 10: mod_base = OTHER; note = 2'-fluoro uridine
  modified_base 11: mod_base = OTHER; note = 2'-O-methyl cytosine
  modified_base 12: mod_base = OTHER; note = 2'-fluoro guanosine
  modified_base 13: mod_base = OTHER; note = 2'-O-methyl cytosine phosphorothioate
  modified_base 14: mod_base = OTHER; note = 2'-fluoro adenosine phosphorothioate
  modified_base 15: mod_base = OTHER; note = 2'-O-methyl adenosine phosphorothioate
  modified_base 16: mod_base = OTHER; note = 2'-fluoro adenosine phosphorothioate
  modified_base 17: mod_base = OTHER; note = 2'-O-methyl guanosine phosphorothioate
  modified_base 18: mod_base = OTHER; note = 2'-O-methyl uridine phosphorothioate
  modified_base 19: mod_base = OTHER; note = 2'-O-methyl uridine phosphorothioate
  modified_base 20: mod_base = OTHER; note = 2'-fluoro guanosine
tattgtcgttcgcaaagttg

SEQ ID NO: 390 - RNA, 20 nt, synthetic construct
  source 1..20: mol_type = other RNA
  modified_base 1: mod_base = OTHER; note = 5' phosphate 2'-O-methyl uridine phosphorothioate
  modified_base 2: mod_base = OTHER; note = 2'-fluoro guanosine phosphorothioate
  modified_base 3: mod_base = OTHER; note = 2'-O-methyl uridine
  modified_base 4: mod_base = OTHER; note = 2'-fluoro uridine
  modified_base 5: mod_base = OTHER; note = 2'-fluoro uridine
  modified_base 6: mod_base = OTHER; note = 2'-fluoro guanosine
  modified_base 7: mod_base = OTHER; note = 2'-O-methyl guanosine
  modified_base 8: mod_base = OTHER; note = 2'-fluoro guanosine
  modified_base 9: mod_base = OTHER; note = 2'-O-methyl adenosine
  modified_base 10: mod_base = OTHER; note = 2'-fluoro uridine
  modified_base 11: mod_base = OTHER; note = 2'-O-methyl adenosine
  modified_base 12: mod_base = OTHER; note = 2'-fluoro adenosine
  modified_base 13: mod_base = OTHER; note = 2'-O-methyl uridine phosphorothioate
  modified_base 14: mod_base = OTHER; note = 2'-fluoro cytosine phosphorothioate
  modified_base 15: mod_base = OTHER; note = 2'-O-methyl guanosine phosphorothioate
  modified_base 16: mod_base = OTHER; note = 2'-fluoro cytosine phosphorothioate
  modified_base 17: mod_base = OTHER; note = 2'-O-methyl cytosine phosphorothioate
  modified_base 18: mod_base = OTHER; note = 2'-O-methyl uridine phosphorothioate
  modified_base 19: mod_base = OTHER; note = 2'-O-methyl cytosine phosphorothioate
  modified_base 20: mod_base = OTHER; note = 2'-fluoro uridine
tgtttgggataatcgcctct

SEQ ID NO: 391 - RNA, 20 nt, synthetic construct
  source 1..20: mol_type = other RNA
  modified_base 1: mod_base = OTHER; note = 5' phosphate 2'-O-methyl uridine phosphorothioate
  modified_base 2: mod_base = OTHER; note = 2'-fluoro cytosine phosphorothioate
  modified_base 3: mod_base = OTHER; note = 2'-O-methyl uridine
  modified_base 4: mod_base = OTHER; note = 2'-fluoro guanosine
  modified_base 5: mod_base = OTHER; note = 2'-fluoro uridine
  modified_base 6: mod_base = OTHER; note = 2'-fluoro adenosine
  modified_base 7: mod_base = OTHER; note = 2'-O-methyl uridine
  modified_base 8: mod_base = OTHER; note = 2'-fluoro guanosine
  modified_base 9: mod_base = OTHER; note = 2'-O-methyl adenosine
  modified_base 10: mod_base = OTHER; note = 2'-fluoro uridine
  modified_base 11: mod_base = OTHER; note = 2'-O-methyl guanosine
  modified_base 12: mod_base = OTHER; note = 2'-fluoro guanosine
  modified_base 13: mod_base = OTHER; note = 2'-O-methyl adenosine phosphorothioate
  modified_base 14: mod_base = OTHER; note = 2'-fluoro guanosine phosphorothioate
  modified_base 15: mod_base = OTHER; note = 2'-O-methyl guanosine phosphorothioate
  modified_base 16: mod_base = OTHER; note = 2'-fluoro cytosine phosphorothioate
  modified_base 17: mod_base = OTHER; note = 2'-O-methyl cytosine phosphorothioate
  modified_base 18: mod_base = OTHER; note = 2'-O-methyl guanosine phosphorothioate
  modified_base 19: mod_base = OTHER; note = 2'-O-methyl adenosine phosphorothioate
  modified_base 20: mod_base = OTHER; note = 2'-fluoro guanosine
tctgtatgatggaggccgag

SEQ ID NO: 392 - RNA, 20 nt, synthetic construct
  source 1..20: mol_type = other RNA
  modified_base 1: mod_base = OTHER; note = 5' phosphate 2'-O-methyl uridine phosphorothioate
  modified_base 2: mod_base = OTHER; note = 2'-fluoro guanosine phosphorothioate
  modified_base 3: mod_base = OTHER; note = 2'-O-methyl uridine
  modified_base 4: mod_base = OTHER; note = 2'-fluoro adenosine
  modified_base 5: mod_base = OTHER; note = 2'-fluoro cytosine
  modified_base 6: mod_base = OTHER; note = 2'-fluoro cytosine
  modified_base 7: mod_base = OTHER; note = 2'-O-methyl cytosine
  modified_base 8: mod_base = OTHER; note = 2'-fluoro guanosine
  modified_base 9: mod_base = OTHER; note = 2'-O-methyl cytosine
  modified_base 10: mod_base = OTHER; note = 2'-fluoro uridine
  modified_base 11: mod_base = OTHER; note = 2'-O-methyl cytosine
  modified_base 12: mod_base = OTHER; note = 2'-fluoro uridine
  modified_base 13: mod_base = OTHER; note = 2'-O-methyl uridine phosphorothioate
  modified_base 14: mod_base = OTHER; note = 2'-fluoro guanosine phosphorothioate
  modified_base 15: mod_base = OTHER; note = 2'-O-methyl cytosine phosphorothioate
  modified_base 16: mod_base = OTHER; note = 2'-fluoro adenosine phosphorothioate
  modified_base 17: mod_base = OTHER; note = 2'-O-methyl guanosine phosphorothioate
  modified_base 18: mod_base = OTHER; note = 2'-O-methyl cytosine phosphorothioate
  modified_base 19: mod_base = OTHER; note = 2'-O-methyl uridine phosphorothioate
  modified_base 20: mod_base = OTHER; note = 2'-fluoro uridine
tgtacccgctcttgcagctt

SEQ ID NO: 393 - RNA, 20 nt, synthetic construct
  source 1..20: mol_type = other RNA
  modified_base 1: mod_base = OTHER; note = 5' phosphate 2'-O-methyl uridine phosphorothioate
  modified_base 2: mod_base = OTHER; note = 2'-fluoro uridine phosphorothioate
  modified_base 3: mod_base = OTHER; note = 2'-O-methyl uridine
  modified_base 4: mod_base = OTHER; note = 2'-fluoro cytosine
  modified_base 5: mod_base = OTHER; note = 2'-fluoro cytosine
  modified_base 6: mod_base = OTHER; note = 2'-fluoro uridine
  modified_base 7: mod_base = OTHER; note = 2'-O-methyl guanosine
  modified_base 8: mod_base = OTHER; note = 2'-fluoro cytosine
  modified_base 9: mod_base = OTHER; note = 2'-O-methyl adenosine
  modified_base 10: mod_base = OTHER; note = 2'-fluoro uridine
  modified_base 11: mod_base = OTHER; note = 2'-O-methyl cytosine
  modified_base 12: mod_base = OTHER; note = 2'-fluoro adenosine
  modified_base 13: mod_base = OTHER; note = 2'-O-methyl guanosine phosphorothioate
  modified_base 14: mod_base = OTHER; note = 2'-fluoro cytosine phosphorothioate
  modified_base 15: mod_base = OTHER; note = 2'-O-methyl cytosine phosphorothioate
  modified_base 16: mod_base = OTHER; note = 2'-fluoro uridine phosphorothioate
  modified_base 17: mod_base = OTHER; note = 2'-O-methyl uridine phosphorothioate
  modified_base 18: mod_base = OTHER; note = 2'-O-methyl adenosine phosphorothioate
  modified_base 19: mod_base = OTHER; note = 2'-O-methyl uridine phosphorothioate
  modified_base 20: mod_base = OTHER; note = 2'-fluoro uridine
tttcctgcatcagccttatt

SEQ ID NO: 394 - RNA, 20 nt, synthetic construct
  source 1..20: mol_type = other RNA
  modified_base 1: mod_base = OTHER; note = 5' phosphate 2'-O-methyl uridine phosphorothioate
  modified_base 2: mod_base = OTHER; note = 2'-fluoro adenosine phosphorothioate
  modified_base 3: mod_base = OTHER; note = 2'-O-methyl guanosine
  modified_base 4: mod_base = OTHER; note = 2'-fluoro adenosine
  modified_base 5: mod_base = OTHER; note = 2'-fluoro guanosine
  modified_base 6: mod_base = OTHER; note = 2'-fluoro uridine
  modified_base 7: mod_base = OTHER; note = 2'-O-methyl cytosine
  modified_base 8: mod_base = OTHER; note = 2'-fluoro cytosine
  modified_base 9: mod_base = OTHER; note = 2'-O-methyl adenosine
  modified_base 10: mod_base = OTHER; note = 2'-fluoro uridine
  modified_base 11: mod_base = OTHER; note = 2'-O-methyl cytosine
  modified_base 12: mod_base = OTHER; note = 2'-fluoro adenosine
  modified_base 13: mod_base = OTHER; note = 2'-O-methyl adenosine phosphorothioate
  modified_base 14: mod_base = OTHER; note = 2'-fluoro adenosine phosphorothioate
  modified_base 15: mod_base = OTHER; note = 2'-O-methyl guanosine phosphorothioate
  modified_base 16: mod_base = OTHER; note = 2'-fluoro cytosine phosphorothioate
  modified_base 17: mod_base = OTHER; note = 2'-O-methyl uridine phosphorothioate
  modified_base 18: mod_base = OTHER; note = 2'-O-methyl uridine phosphorothioate
  modified_base 19: mod_base = OTHER; note = 2'-O-methyl uridine phosphorothioate
  modified_base 20: mod_base = OTHER; note = 2'-fluoro uridine
tagagtccatcaaagctttt

SEQ ID NO: 395 - RNA, 20 nt, synthetic construct
  source 1..20: mol_type = other RNA
  modified_base 1: mod_base = OTHER; note = 5' phosphate 2'-O-methyl uridine phosphorothioate
  modified_base 2: mod_base = OTHER; note = 2'-fluoro adenosine phosphorothioate
  modified_base 3: mod_base = OTHER; note = 2'-O-methyl adenosine
  modified_base 4: mod_base = OTHER; note = 2'-fluoro adenosine
  modified_base 5: mod_base = OTHER; note = 2'-fluoro guanosine
  modified_base 6: mod_base = OTHER; note = 2'-fluoro uridine
  modified_base 7: mod_base = OTHER; note = 2'-O-methyl uridine
  modified_base 8: mod_base = OTHER; note = 2'-fluoro cytosine
  modified_base 9: mod_base = OTHER; note = 2'-O-methyl cytosine
  modified_base 10: mod_base = OTHER; note = 2'-fluoro adenosine
  modified_base 11: mod_base = OTHER; note = 2'-O-methyl uridine
  modified_base 12: mod_base = OTHER; note = 2'-fluoro adenosine
  modified_base 13: mod_base = OTHER; note = 2'-O-methyl guanosine phosphorothioate
  modified_base 14: mod_base = OTHER; note = 2'-fluoro cytosine phosphorothioate
  modified_base 15: mod_base = OTHER; note = 2'-O-methyl guanosine phosphorothioate
  modified_base 16: mod_base = OTHER; note = 2'-fluoro adenosine phosphorothioate
  modified_base 17: mod_base = OTHER; note = 2'-O-methyl uridine phosphorothioate
  modified_base 18: mod_base = OTHER; note = 2'-O-methyl guanosine phosphorothioate
  modified_base 19: mod_base = OTHER; note = 2'-O-methyl cytosine phosphorothioate
  modified_base 20: mod_base = OTHER; note = 2'-fluoro cytosine
taaagttccatagcgatgcc

SEQ ID NO: 396 - RNA, 20 nt, synthetic construct
  source 1..20: mol_type = other RNA
  modified_base 1: mod_base = OTHER; note = 5' phosphate 2'-O-methyl uridine phosphorothioate
  modified_base 2: mod_base = OTHER; note = 2'-fluoro uridine phosphorothioate
  modified_base 3: mod_base = OTHER; note = 2'-O-methyl uridine
  modified_base 4: mod_base = OTHER; note = 2'-fluoro uridine
  modified_base 5: mod_base = OTHER; note = 2'-fluoro cytosine
  modified_base 6: mod_base = OTHER; note = 2'-fluoro uridine
  modified_base 7: mod_base = OTHER; note = 2'-O-methyl uridine
  modified_base 8: mod_base = OTHER; note = 2'-fluoro guanosine
  modified_base 9: mod_base = OTHER; note = 2'-O-methyl adenosine
  modified_base 10: mod_base = OTHER; note = 2'-fluoro adenosine
  modified_base 11: mod_base = OTHER; note = 2'-O-methyl adenosine
  modified_base 12: mod_base = OTHER; note = 2'-fluoro guanosine
  modified_base 13: mod_base = OTHER; note = 2'-O-methyl guanosine phosphorothioate
  modified_base 14: mod_base = OTHER; note = 2'-fluoro adenosine phosphorothioate
  modified_base 15: mod_base = OTHER; note = 2'-O-methyl cytosine phosphorothioate
  modified_base 16: mod_base = OTHER; note = 2'-fluoro adenosine phosphorothioate
  modified_base 17: mod_base = OTHER; note = 2'-O-methyl guanosine phosphorothioate
  modified_base 18: mod_base = OTHER; note = 2'-O-methyl guanosine phosphorothioate
  modified_base 19: mod_base = OTHER; note = 2'-O-methyl guanosine phosphorothioate
  modified_base 20: mod_base = OTHER; note = 2'-fluoro cytosine
ttttcttgaaaggacagggc

SEQ ID NO: 397 - RNA, 20 nt, synthetic construct
  source 1..20: mol_type = other RNA
  modified_base 1: mod_base = OTHER; note = 5' phosphate 2'-O-methyl uridine phosphorothioate
  modified_base 2: mod_base = OTHER; note = 2'-fluoro uridine phosphorothioate
  modified_base 3: mod_base = OTHER; note = 2'-O-methyl cytosine
  modified_base 4: mod_base = OTHER; note = 2'-fluoro adenosine
  modified_base 5: mod_base = OTHER; note = 2'-fluoro guanosine
  modified_base 6: mod_base = OTHER; note = 2'-fluoro uridine
  modified_base 7: mod_base = OTHER; note = 2'-O-methyl guanosine
  modified_base 8: mod_base = OTHER; note = 2'-fluoro cytosine
  modified_base 9: mod_base = OTHER; note = 2'-O-methyl uridine
  modified_base 10: mod_base = OTHER; note = 2'-fluoro uridine
  modified_base 11: mod_base = OTHER; note = 2'-O-methyl uridine
  modified_base 12: mod_base = OTHER; note = 2'-fluoro uridine
  modified_base 13: mod_base = OTHER; note = 2'-O-methyl adenosine phosphorothioate
  modified_base 14: mod_base = OTHER; note = 2'-fluoro uridine phosphorothioate
  modified_base 15: mod_base = OTHER; note = 2'-O-methyl guanosine phosphorothioate
  modified_base 16: mod_base = OTHER; note = 2'-fluoro adenosine phosphorothioate
  modified_base 17: mod_base = OTHER; note = 2'-O-methyl cytosine phosphorothioate
  modified_base 18: mod_base = OTHER; note = 2'-O-methyl guanosine phosphorothioate
  modified_base 19: mod_base = OTHER; note = 2'-O-methyl adenosine phosphorothioate
  modified_base 20: mod_base = OTHER; note = 2'-fluoro guanosine
ttcagtgcttttatgacgag

SEQ ID NO: 398 - RNA, 20 nt, synthetic construct
  source 1..20: mol_type = other RNA
  modified_base 1: mod_base = OTHER; note = 5' phosphate 2'-O-methyl uridine phosphorothioate
  modified_base 2: mod_base = OTHER; note = 2'-fluoro cytosine phosphorothioate
  modified_base 3: mod_base = OTHER; note = 2'-O-methyl adenosine
  modified_base 4: mod_base = OTHER; note = 2'-fluoro guanosine
  modified_base 5: mod_base = OTHER; note = 2'-fluoro guanosine
  modified_base 6: mod_base = OTHER; note = 2'-fluoro uridine
  modified_base 7: mod_base = OTHER; note = 2'-O-methyl uridine
  modified_base 8: mod_base = OTHER; note = 2'-fluoro guanosine
  modified_base 9: mod_base = OTHER; note = 2'-O-methyl adenosine
  modified_base 10: mod_base = OTHER; note = 2'-fluoro adenosine
  modified_base 11: mod_base = OTHER; note = 2'-O-methyl cytosine
  modified_base 12: mod_base = OTHER; note = 2'-fluoro uridine
  modified_base 13: mod_base = OTHER; note = 2'-O-methyl cytosine phosphorothioate
  modified_base 14: mod_base = OTHER; note = 2'-fluoro cytosine phosphorothioate
  modified_base 15: mod_base = OTHER; note = 2'-O-methyl guanosine phosphorothioate
  modified_base 16: mod_base = OTHER; note = 2'-fluoro adenosine phosphorothioate
  modified_base 17: mod_base = OTHER; note = 2'-O-methyl guanosine phosphorothioate
  modified_base 18: mod_base = OTHER; note = 2'-O-methyl uridine phosphorothioate
  modified_base 19: mod_base = OTHER; note = 2'-O-methyl guanosine phosphorothioate
  modified_base 20: mod_base = OTHER; note = 2'-fluoro cytosine
tcaggttgaactccgagtgc

SEQ ID NO: 399 - RNA, 20 nt, synthetic construct
  source 1..20: mol_type = other RNA
  modified_base 1: mod_base = OTHER; note = 5' phosphate 2'-O-methyl uridine phosphorothioate
  modified_base 2: mod_base = OTHER; note = 2'-fluoro uridine phosphorothioate
  modified_base 3: mod_base = OTHER; note = 2'-O-methyl cytosine
  modified_base 4: mod_base = OTHER; note = 2'-fluoro cytosine
  modified_base 5: mod_base = OTHER; note = 2'-fluoro cytosine
  modified_base 6: mod_base = OTHER; note = 2'-fluoro adenosine
  modified_base 7: mod_base = OTHER; note = 2'-O-methyl adenosine
  modified_base 8: mod_base = OTHER; note = 2'-fluoro uridine
  modified_base 9: mod_base = OTHER; note = 2'-O-methyl guanosine
  modified_base 10: mod_base = OTHER; note = 2'-fluoro uridine
  modified_base 11: mod_base = OTHER; note = 2'-O-methyl cytosine
  modified_base 12: mod_base = OTHER; note = 2'-fluoro cytosine
  modified_base 13: mod_base = OTHER; note = 2'-O-methyl uridine phosphorothioate
  modified_base 14: mod_base = OTHER; note = 2'-fluoro guanosine phosphorothioate
  modified_base 15: mod_base = OTHER; note = 2'-O-methyl cytosine phosphorothioate
  modified_base 16: mod_base = OTHER; note = 2'-fluoro adenosine phosphorothioate
  modified_base 17: mod_base = OTHER; note = 2'-O-methyl guanosine phosphorothioate
  modified_base 18: mod_base = OTHER; note = 2'-O-methyl cytosine phosphorothioate
  modified_base 19: mod_base = OTHER; note = 2'-O-methyl guanosine phosphorothioate
  modified_base 20: mod_base = OTHER; note = 2'-fluoro uridine
ttcccaatgtcctgcagcgt

SEQ ID NO: 400 - RNA, 20 nt, synthetic construct
  source 1..20: mol_type = other RNA
  modified_base 1: mod_base = OTHER; note = 5' phosphate 2'-O-methyl uridine phosphorothioate
  modified_base 2: mod_base = OTHER; note = 2'-fluoro uridine phosphorothioate
  modified_base 3: mod_base = OTHER; note = 2'-O-methyl uridine
  modified_base 4: mod_base = OTHER; note = 2'-fluoro uridine
  modified_base 5: mod_base = OTHER; note = 2'-fluoro guanosine
  modified_base 6: mod_base = OTHER; note = 2'-fluoro uridine
  modified_base 7: mod_base = OTHER; note = 2'-O-methyl uridine
  modified_base 8: mod_base = OTHER; note = 2'-fluoro uridine
  modified_base 9: mod_base = OTHER; note = 2'-O-methyl uridine
  modified_base 10: mod_base = OTHER; note = 2'-fluoro cytosine
  modified_base 11: mod_base = OTHER; note = 2'-O-methyl uridine
  modified_base 12: mod_base = OTHER; note = 2'-fluoro uridine
  modified_base 13: mod_base = OTHER; note = 2'-O-methyl guanosine phosphorothioate
  modified_base 14: mod_base = OTHER; note = 2'-fluoro adenosine phosphorothioate
  modified_base 15: mod_base = OTHER; note = 2'-O-methyl adenosine phosphorothioate
  modified_base 16: mod_base = OTHER; note = 2'-fluoro adenosine phosphorothioate
  modified_base 17: mod_base = OTHER; note = 2'-O-methyl guanosine phosphorothioate
  modified_base 18: mod_base = OTHER; note = 2'-O-methyl guanosine phosphorothioate
  modified_base 19: mod_base = OTHER; note = 2'-O-methyl adenosine phosphorothioate
  modified_base 20: mod_base = OTHER; note = 2'-fluoro cytosine
ttttgttttcttgaaaggac

SEQ ID NO: 401 - RNA, 20 nt, synthetic construct
  source 1..20: mol_type = other RNA
  modified_base 1: mod_base = OTHER; note = 5' phosphate 2'-O-methyl uridine phosphorothioate
  modified_base 2: mod_base = OTHER; note = 2'-fluoro uridine phosphorothioate
  modified_base 3: mod_base = OTHER; note = 2'-O-methyl uridine
  modified_base 4: mod_base = OTHER; note = 2'-fluoro adenosine
  modified_base 5: mod_base = OTHER; note = 2'-fluoro adenosine
  modified_base 6: mod_base = OTHER; note = 2'-fluoro uridine
  modified_base 7: mod_base = OTHER; note = 2'-O-methyl cytosine
  modified_base 8: mod_base = OTHER; note = 2'-fluoro uridine
  modified_base 9: mod_base = OTHER; note = 2'-O-methyl cytosine
  modified_base 10: mod_base = OTHER; note = 2'-fluoro adenosine
  modified_base 11: mod_base = OTHER; note = 2'-O-methyl uridine
  modified_base 12: mod_base = OTHER; note = 2'-fluoro uridine
  modified_base 13: mod_base = OTHER; note = 2'-O-methyl guanosine phosphorothioate
  modified_base 14: mod_base = OTHER; note = 2'-fluoro uridine phosphorothioate
  modified_base 15: mod_base = OTHER; note = 2'-O-methyl cytosine phosphorothioate
  modified_base 16: mod_base = OTHER; note = 2'-fluoro guanosine phosphorothioate
  modified_base 17: mod_base = OTHER; note = 2'-O-methyl uridine phosphorothioate
  modified_base 18: mod_base = OTHER; note = 2'-O-methyl uridine phosphorothioate
  modified_base 19: mod_base = OTHER; note = 2'-O-methyl cytosine phosphorothioate
  modified_base 20: mod_base = OTHER; note = 2'-fluoro guanosine
tttaatctcattgtcgttcg

SEQ ID NO: 402 - RNA, 20 nt, synthetic construct
  source 1..20: mol_type = other RNA
  modified_base 1: mod_base = OTHER; note = 5' phosphate 2'-O-methyl uridine phosphorothioate
  modified_base 2: mod_base = OTHER; note = 2'-fluoro guanosine phosphorothioate
  modified_base 3: mod_base = OTHER; note = 2'-O-methyl cytosine
  modified_base 4: mod_base = OTHER; note = 2'-fluoro adenosine
  modified_base 5: mod_base = OTHER; note = 2'-fluoro guanosine
  modified_base 6: mod_base = OTHER; note = 2'-fluoro uridine
  modified_base 7: mod_base = OTHER; note = 2'-O-methyl cytosine
  modified_base 8: mod_base = OTHER; note = 2'-fluoro cytosine
  modified_base 9: mod_base = OTHER; note = 2'-O-methyl guanosine
  modified_base 10: mod_base = OTHER; note = 2'-fluoro cytosine
  modified_base 11: mod_base = OTHER; note = 2'-O-methyl cytosine
  modified_base 12: mod_base = OTHER; note = 2'-fluoro adenosine
  modified_base 13: mod_base = OTHER; note = 2'-O-methyl guanosine phosphorothioate
  modified_base 14: mod_base = OTHER; note = 2'-fluoro adenosine phosphorothioate
  modified_base 15: mod_base = OTHER; note = 2'-O-methyl guanosine phosphorothioate
  modified_base 16: mod_base = OTHER; note = 2'-fluoro adenosine phosphorothioate
  modified_base 17: mod_base = OTHER; note = 2'-O-methyl adenosine phosphorothioate
  modified_base 18: mod_base = OTHER; note = 2'-O-methyl adenosine phosphorothioate
  modified_base 19: mod_base = OTHER; note = 2'-O-methyl adenosine phosphorothioate
  modified_base 20: mod_base = OTHER; note = 2'-fluoro uridine
tgcagtccgccagagaaaat

SEQ ID NO: 403 - RNA, 20 nt, synthetic construct
  source 1..20: mol_type = other RNA
  modified_base 1: mod_base = OTHER; note = 5' phosphate 2'-O-methyl uridine phosphorothioate
  modified_base 2: mod_base = OTHER; note = 2'-fluoro uridine phosphorothioate
  modified_base 3: mod_base = OTHER; note = 2'-O-methyl cytosine
  modified_base 4: mod_base = OTHER; note = 2'-fluoro adenosine
  modified_base 5: mod_base = OTHER; note = 2'-fluoro guanosine
  modified_base 6: mod_base = OTHER; note = 2'-fluoro guanosine
  modified_base 7: mod_base = OTHER; note = 2'-O-methyl adenosine
  modified_base 8: mod_base = OTHER; note = 2'-fluoro cytosine
  modified_base 9: mod_base = OTHER; note = 2'-O-methyl guanosine
  modified_base 10: mod_base = OTHER; note = 2'-fluoro uridine
  modified_base 11: mod_base = OTHER; note = 2'-O-methyl cytosine
  modified_base 12: mod_base = OTHER; note = 2'-fluoro guanosine
  modified_base 13: mod_base = OTHER; note = 2'-O-methyl uridine phosphorothioate
  modified_base 14: mod_base = OTHER; note = 2'-fluoro guanosine phosphorothioate
  modified_base 15: mod_base = OTHER; note = 2'-O-methyl cytosine phosphorothioate
  modified_base 16: mod_base = OTHER; note = 2'-fluoro adenosine phosphorothioate
  modified_base 17: mod_base = OTHER; note = 2'-O-methyl guanosine phosphorothioate
  modified_base 18: mod_base = OTHER; note = 2'-O-methyl uridine phosphorothioate
  modified_base 19: mod_base = OTHER; note = 2'-O-methyl uridine phosphorothioate
  modified_base 20: mod_base = OTHER; note = 2'-fluoro uridine
ttcaggacgtcgtgcagttt

SEQ ID NO: 404 - RNA, 20 nt, synthetic construct
  source 1..20: mol_type = other RNA
  modified_base 1: mod_base = OTHER; note = 5' phosphate 2'-O-methyl uridine phosphorothioate
  modified_base 2: mod_base = OTHER; note = 2'-fluoro uridine phosphorothioate
  modified_base 3: mod_base = OTHER; note = 2'-O-methyl uridine
  modified_base 4: mod_base = OTHER; note = 2'-fluoro guanosine
  modified_base 5: mod_base = OTHER; note = 2'-fluoro cytosine
  modified_base 6: mod_base = OTHER; note = 2'-fluoro guanosine
  modified_base 7: mod_base = OTHER; note = 2'-O-methyl guanosine
  modified_base 8: mod_base = OTHER; note = 2'-fluoro cytosine
  modified_base 9: mod_base = OTHER; note = 2'-O-methyl cytosine
  modified_base 10: mod_base = OTHER; note = 2'-fluoro adenosine
  modified_base 11: mod_base = OTHER; note = 2'-O-methyl adenosine
  modified_base 12: mod_base = OTHER; note = 2'-fluoro adenosine
  modified_base 13: mod_base = OTHER; note = 2'-O-methyl adenosine phosphorothioate
  modified_base 14: mod_base = OTHER; note = 2'-fluoro guanosine phosphorothioate
  modified_base 15: mod_base = OTHER; note = 2'-O-methyl cytosine phosphorothioate
  modified_base 16: mod_base = OTHER; note = 2'-fluoro adenosine phosphorothioate
  modified_base 17: mod_base = OTHER; note = 2'-O-methyl uridine phosphorothioate
  modified_base 18: mod_base = OTHER; note = 2'-O-methyl uridine phosphorothioate
  modified_base 19: mod_base = OTHER; note = 2'-O-methyl uridine phosphorothioate
  modified_base 20: mod_base = OTHER; note = 2'-fluoro cytosine
tttgcggccaaaagcatttc

SEQ ID NO: 405 - RNA, 20 nt, synthetic construct
  source 1..20: mol_type = other RNA
  modified_base 1: mod_base = OTHER; note = 5' phosphate 2'-O-methyl uridine phosphorothioate
  modified_base 2: mod_base = OTHER; note = 2'-fluoro adenosine phosphorothioate
  modified_base 3: mod_base = OTHER; note = 2'-O-methyl adenosine
  modified_base 4: mod_base = OTHER; note = 2'-fluoro adenosine
  modified_base 5: mod_base = OTHER; note = 2'-fluoro cytosine
  modified_base 6: mod_base = OTHER; note = 2'-fluoro uridine
  modified_base 7: mod_base = OTHER; note = 2'-O-methyl guanosine
  modified_base 8: mod_base = OTHER; note = 2'-fluoro cytosine
  modified_base 9: mod_base = OTHER; note = 2'-O-methyl uridine
  modified_base 10: mod_base = OTHER; note = 2'-fluoro uridine
  modified_base 11: mod_base = OTHER; note = 2'-O-methyl cytosine
  modified_base 12: mod_base = OTHER; note = 2'-fluoro adenosine
  modified_base 13: mod_base = OTHER; note = 2'-O-methyl guanosine phosphorothioate
  modified_base 14: mod_base = OTHER; note = 2'-fluoro cytosine phosphorothioate
  modified_base 15: mod_base = OTHER; note = 2'-O-methyl adenosine phosphorothioate
  modified_base 16: mod_base = OTHER; note = 2'-fluoro cytosine phosphorothioate
  modified_base 17: mod_base = OTHER; note = 2'-O-methyl adenosine phosphorothioate
  modified_base 18: mod_base = OTHER; note = 2'-O-methyl adenosine phosphorothioate
  modified_base 19: mod_base = OTHER; note = 2'-O-methyl adenosine phosphorothioate
  modified_base 20: mod_base = OTHER; note = 2'-fluoro uridine
taaactgcttcagcacaaat

SEQ ID NO: 406 - RNA, 20 nt, synthetic construct
  source 1..20: mol_type = other RNA
  modified_base 1: mod_base = OTHER; note = 5' phosphate 2'-O-methyl uridine phosphorothioate
  modified_base 2: mod_base = OTHER; note = 2'-fluoro cytosine phosphorothioate
  modified_base 3: mod_base = OTHER; note = 2'-O-methyl uridine
  modified_base 4: mod_base = OTHER; note = 2'-fluoro guanosine
  modified_base 5: mod_base = OTHER; note = 2'-fluoro cytosine
  modified_base 6: mod_base = OTHER; note = 2'-fluoro guanosine
  modified_base 7: mod_base = OTHER; note = 2'-O-methyl uridine
  modified_base 8: mod_base = OTHER; note = 2'-fluoro cytosine
  modified_base 9: mod_base = OTHER; note = 2'-O-methyl adenosine
  modified_base 10: mod_base = OTHER; note = 2'-fluoro uridine
  modified_base 11: mod_base = OTHER; note = 2'-O-methyl cytosine
  modified_base 12: mod_base = OTHER; note = 2'-fluoro adenosine
  modified_base 13: mod_base = OTHER; note = 2'-O-methyl cytosine phosphorothioate
  modified_base 14: mod_base = OTHER; note = 2'-fluoro uridine phosphorothioate
  modified_base 15: mod_base = OTHER; note = 2'-O-methyl guanosine phosphorothioate
  modified_base 16: mod_base = OTHER; note = 2'-fluoro cytosine phosphorothioate
  modified_base 17: mod_base = OTHER; note = 2'-O-methyl adenosine phosphorothioate
  modified_base 18: mod_base = OTHER; note = 2'-O-methyl cytosine phosphorothioate
  modified_base 19: mod_base = OTHER; note = 2'-O-methyl adenosine phosphorothioate
  modified_base 20: mod_base = OTHER; note = 2'-fluoro guanosine
tctgcgtcatcactgcacag

SEQ ID NO: 407 - RNA, 20 nt, synthetic construct
  source 1..20: mol_type = other RNA
  modified_base 1: mod_base = OTHER; note = 5' phosphate 2'-O-methyl uridine phosphorothioate
  modified_base 2: mod_base = OTHER; note = 2'-fluoro uridine phosphorothioate
  modified_base 3: mod_base = OTHER; note = 2'-O-methyl guanosine
  modified_base 4: mod_base = OTHER; note = 2'-fluoro adenosine
  modified_base 5: mod_base = OTHER; note = 2'-fluoro uridine
  modified_base 6: mod_base = OTHER; note = 2'-fluoro guanosine
  modified_base 7: mod_base = OTHER; note = 2'-O-methyl cytosine
  modified_base 8: mod_base = OTHER; note = 2'-fluoro guanosine
  modified_base 9: mod_base = OTHER; note = 2'-O-methyl guanosine
  modified_base 10: mod_base = OTHER; note = 2'-fluoro uridine
  modified_base 11: mod_base = OTHER; note = 2'-O-methyl adenosine
  modified_base 12: mod_base = OTHER; note = 2'-fluoro guanosine
  modified_base 13: mod_base = OTHER; note = 2'-O-methyl adenosine phosphorothioate
  modified_base 14: mod_base = OTHER; note = 2'-fluoro uridine phosphorothioate
  modified_base 15: mod_base = OTHER; note = 2'-O-methyl guanosine phosphorothioate
  modified_base 16: mod_base = OTHER; note = 2'-fluoro adenosine phosphorothioate
  modified_base 17: mod_base = OTHER; note = 2'-O-methyl adenosine phosphorothioate
  modified_base 18: mod_base = OTHER; note = 2'-O-methyl cytosine phosphorothioate
  modified_base 19: mod_base = OTHER; note = 2'-O-methyl uridine phosphorothioate
  modified_base 20: mod_base = OTHER; note = 2'-fluoro cytosine
ttgatgcggtagatgaactc

SEQ ID NO: 408 - RNA, 20 nt, synthetic construct
  source 1..20: mol_type = other RNA
  modified_base 1: mod_base = OTHER; note = 5' phosphate 2'-O-methyl uridine phosphorothioate
  modified_base 2: mod_base = OTHER; note = 2'-fluoro uridine phosphorothioate
  modified_base 3: mod_base = OTHER; note = 2'-O-methyl cytosine
  modified_base 4: mod_base = OTHER; note = 2'-fluoro cytosine
  modified_base 5: mod_base = OTHER; note = 2'-fluoro uridine
  modified_base 6: mod_base = OTHER; note = 2'-fluoro guanosine
  modified_base 7: mod_base = OTHER; note = 2'-O-methyl uridine
  modified_base 8: mod_base = OTHER; note = 2'-fluoro guanosine
  modified_base 9: mod_base = OTHER; note = 2'-O-methyl uridine
  modified_base 10: mod_base = OTHER; note = 2'-fluoro adenosine
  modified_base 11: mod_base = OTHER; note = 2'-O-methyl cytosine
  modified_base 12: mod_base = OTHER; note = 2'-fluoro adenosine
  modified_base 13: mod_base = OTHER; note = 2'-O-methyl uridine phosphorothioate
  modified_base 14: mod_base = OTHER; note = 2'-fluoro guanosine phosphorothioate
  modified_base 15: mod_base = OTHER; note = 2'-O-methyl cytosine phosphorothioate
  modified_base 16: mod_base = OTHER; note = 2'-fluoro adenosine phosphorothioate
  modified_base 17: mod_base = OTHER; note = 2'-O-methyl guanosine phosphorothioate
  modified_base 18: mod_base = OTHER; note = 2'-O-methyl guanosine phosphorothioate
  modified_base 19: mod_base = OTHER; note = 2'-O-methyl uridine phosphorothioate
  modified_base 20: mod_base = OTHER; note = 2'-fluoro guanosine
ttcctgtgtacatgcaggtg

SEQ ID NO: 409 - RNA, 20 nt, synthetic construct
  source 1..20: mol_type = other RNA
  modified_base 1: mod_base = OTHER; note = 5' phosphate 2'-O-methyl uridine phosphorothioate
  modified_base 2: mod_base = OTHER; note = 2'-fluoro uridine phosphorothioate
  modified_base 3: mod_base = OTHER; note = 2'-O-methyl uridine
  modified_base 4: mod_base = OTHER; note = 2'-fluoro uridine
  modified_base 5: mod_base = OTHER; note = 2'-fluoro adenosine
  modified_base 6: mod_base = OTHER; note = 2'-fluoro guanosine
  modified_base 7: mod_base = OTHER; note = 2'-O-methyl guanosine
  modified_base 8: mod_base = OTHER; note = 2'-fluoro guanosine
  modified_base 9: mod_base = OTHER; note = 2'-O-methyl adenosine
  modified_base 10: mod_base = OTHER; note = 2'-fluoro uridine
  modified_base 11: mod_base = OTHER; note = 2'-O-methyl cytosine
  modified_base 12: mod_base = OTHER; note = 2'-fluoro guanosine
  modified_base 13: mod_base = OTHER; note = 2'-O-methyl cytosine phosphorothioate
  modified_base 14: mod_base = OTHER; note = 2'-fluoro uridine phosphorothioate
  modified_base 15: mod_base = OTHER; note = 2'-O-methyl guanosine phosphorothioate
  modified_base 16: mod_base = OTHER; note = 2'-fluoro cytosine phosphorothioate
  modified_base 17: mod_base = OTHER; note = 2'-O-methyl adenosine phosphorothioate
  modified_base 18: mod_base = OTHER; note = 2'-O-methyl guanosine phosphorothioate
  modified_base 19: mod_base = OTHER; note = 2'-O-methyl cytosine phosphorothioate
  modified_base 20: mod_base = OTHER; note = 2'-fluoro cytosine
ttttagggatcgctgcagcc

SEQ ID NO: 410 - RNA, 20 nt, synthetic construct
  source 1..20: mol_type = other RNA
  modified_base 1: mod_base = OTHER; note = 5' phosphate 2'-O-methyl uridine phosphorothioate
  modified_base 2: mod_base = OTHER; note = 2'-fluoro uridine phosphorothioate
  modified_base 3: mod_base = OTHER; note = 2'-O-methyl adenosine
  modified_base 4: mod_base = OTHER; note = 2'-fluoro guanosine
  modified_base 5: mod_base = OTHER; note = 2'-fluoro cytosine
  modified_base 6: mod_base = OTHER; note = 2'-fluoro guanosine
  modified_base 7: mod_base = OTHER; note = 2'-O-methyl adenosine
  modified_base 8: mod_base = OTHER; note = 2'-fluoro uridine
  modified_base 9: mod_base = OTHER; note = 2'-O-methyl guanosine
  modified_base 10: mod_base = OTHER; note = 2'-fluoro cytosine
  modified_base 11: mod_base = OTHER; note = 2'-O-methyl cytosine
  modified_base 12: mod_base = OTHER; note = 2'-fluoro cytosine
  modified_base 13: mod_base = OTHER; note = 2'-O-methyl adenosine phosphorothioate
  modified_base 14: mod_base = OTHER; note = 2'-fluoro guanosine phosphorothioate
  modified_base 15: mod_base = OTHER; note = 2'-O-methyl adenosine phosphorothioate
  modified_base 16: mod_base = OTHER; note = 2'-fluoro adenosine phosphorothioate
  modified_base 17: mod_base = OTHER; note = 2'-O-methyl guanosine phosphorothioate
  modified_base 18: mod_base = OTHER; note = 2'-O-methyl uridine phosphorothioate
  modified_base 19: mod_base = OTHER; note = 2'-O-methyl uridine phosphorothioate
  modified_base 20: mod_base = OTHER; note = 2'-fluoro uridine
ttagcgatgcccagaagttt

SEQ ID NO: 411 - RNA, 20 nt, synthetic construct
  source 1..20: mol_type = other RNA
  modified_base 1: mod_base = OTHER; note = 5' phosphate 2'-O-methyl uridine phosphorothioate
  modified_base 2: mod_base = OTHER; note = 2'-fluoro guanosine phosphorothioate
  modified_base 3: mod_base = OTHER; note = 2'-O-methyl uridine
  modified_base 4: mod_base = OTHER; note = 2'-fluoro cytosine
  modified_base 5: mod_base = OTHER; note = 2'-fluoro cytosine
  modified_base 6: mod_base = OTHER; note = 2'-fluoro uridine
  modified_base 7: mod_base = OTHER; note = 2'-O-methyl cytosine
  modified_base 8: mod_base = OTHER; note = 2'-fluoro guanosine
  modified_base 9: mod_base = OTHER; note = 2'-O-methyl guanosine
  modified_base 10: mod_base = OTHER; note = 2'-fluoro uridine
  modified_base 11: mod_base = OTHER; note = 2'-O-methyl cytosine
  modified_base 12: mod_base = OTHER; note = 2'-fluoro guanosine
  modified_base 13: mod_base = OTHER; note = 2'-O-methyl cytosine phosphorothioate
  modified_base 14: mod_base = OTHER; note = 2'-fluoro adenosine phosphorothioate
  modified_base 15: mod_base = OTHER; note = 2'-O-methyl cytosine phosphorothioate
  modified_base 16: mod_base = OTHER; note = 2'-fluoro uridine phosphorothioate
  modified_base 17: mod_base = OTHER; note = 2'-O-methyl uridine phosphorothioate
  modified_base 18: mod_base = OTHER; note = 2'-O-methyl guanosine phosphorothioate
  modified_base 19: mod_base = OTHER; note = 2'-O-methyl uridine phosphorothioate
  modified_base 20: mod_base = OTHER; note = 2'-fluoro adenosine
tgtcctcggtcgcacttgta

SEQ ID NO: 412 - RNA, 20 nt, synthetic construct
  source 1..20: mol_type = other RNA
  modified_base 1: mod_base = OTHER; note = 5' phosphate 2'-O-methyl uridine phosphorothioate
  modified_base 2: mod_base = OTHER; note = 2'-fluoro guanosine phosphorothioate
  modified_base 3: mod_base = OTHER; note = 2'-O-methyl uridine
  modified_base 4: mod_base = OTHER; note = 2'-fluoro adenosine
  modified_base 5: mod_base = OTHER; note = 2'-fluoro cytosine
  modified_base 6: mod_base = OTHER; note = 2'-fluoro uridine
  modified_base 7: mod_base = OTHER; note = 2'-O-methyl guanosine
  modified_base 8: mod_base = OTHER; note = 2'-fluoro cytosine
  modified_base 9: mod_base = OTHER; note = 2'-O-methyl uridine
  modified_base 10: mod_base = OTHER; note = 2'-fluoro uridine
  modified_base 11: mod_base = OTHER; note = 2'-O-methyl cytosine
  modified_base 12: mod_base = OTHER; note = 2'-fluoro adenosine
  modified_base 13: mod_base = OTHER; note = 2'-O-methyl guanosine phosphorothioate
  modified_base 14: mod_base = OTHER; note = 2'-fluoro uridine phosphorothioate
  modified_base 15: mod_base = OTHER; note = 2'-O-methyl guanosine phosphorothioate
  modified_base 16: mod_base = OTHER; note = 2'-fluoro cytosine phosphorothioate
  modified_base 17: mod_base = OTHER; note = 2'-O-methyl uridine phosphorothioate
  modified_base 18: mod_base = OTHER; note = 2'-O-methyl uridine phosphorothioate
  modified_base 19: mod_base = OTHER; note = 2'-O-methyl uridine phosphorothioate
  modified_base 20: mod_base = OTHER; note = 2'-fluoro uridine
tgtactgcttcagtgctttt

SEQ ID NO: 413 - RNA, 20 nt, synthetic construct
  source 1..20: mol_type = other RNA
  modified_base 1: mod_base = OTHER; note = 5' phosphate 2'-O-methyl uridine phosphorothioate
  modified_base 2: mod_base = OTHER; note = 2'-fluoro guanosine phosphorothioate
  modified_base 3: mod_base = OTHER; note = 2'-O-methyl cytosine
  modified_base 4: mod_base = OTHER; note = 2'-fluoro guanosine
  modified_base 5: mod_base = OTHER; note = 2'-fluoro guanosine
  modified_base 6: mod_base = OTHER; note = 2'-fluoro uridine
  modified_base 7: mod_base = OTHER; note = 2'-O-methyl adenosine
  modified_base 8: mod_base = OTHER; note = 2'-fluoro guanosine
  modified_base 9: mod_base = OTHER; note = 2'-O-methyl adenosine
  modified_base 10: mod_base = OTHER; note = 2'-fluoro uridine
  modified_base 11: mod_base = OTHER; note = 2'-O-methyl guanosine
  modified_base 12: mod_base = OTHER; note = 2'-fluoro adenosine
  modified_base 13: mod_base = OTHER; note = 2'-O-methyl adenosine phosphorothioate
  modified_base 14: mod_base = OTHER; note = 2'-fluoro cytosine phosphorothioate
  modified_base 15: mod_base = OTHER; note = 2'-O-methyl uridine phosphorothioate
  modified_base 16: mod_base = OTHER; note = 2'-fluoro cytosine phosphorothioate
  modified_base 17: mod_base = OTHER; note = 2'-O-methyl uridine phosphorothioate
  modified_base 18: mod_base = OTHER; note = 2'-O-methyl uridine phosphorothioate
  modified_base 19: mod_base = OTHER; note = 2'-O-methyl uridine phosphorothioate
  modified_base 20: mod_base = OTHER; note = 2'-fluoro adenosine
tgcggtagatgaactcttta

SEQ ID NO: 414 - RNA, 20 nt, synthetic construct
  source 1..20: mol_type = other RNA
  modified_base 1: mod_base = OTHER; note = 5' phosphate 2'-O-methyl uridine phosphorothioate
  modified_base 2: mod_base = OTHER; note = 2'-fluoro cytosine phosphorothioate
  modified_base 3: mod_base = OTHER; note = 2'-O-methyl cytosine
  modified_base 4: mod_base = OTHER; note = 2'-fluoro adenosine
  modified_base 5: mod_base = OTHER; note = 2'-fluoro guanosine
  modified_base 6: mod_base = OTHER; note = 2'-fluoro uridine
  modified_base 7: mod_base = OTHER; note = 2'-O-methyl uridine
  modified_base 8: mod_base = OTHER; note = 2'-fluoro guanosine
  modified_base 9: mod_base = OTHER; note = 2'-O-methyl guanosine
  modified_base 10: mod_base = OTHER; note = 2'-fluoro adenosine
  modified_base 11: mod_base = OTHER; note = 2'-O-methyl guanosine
  modified_base 12: mod_base = OTHER; note = 2'-fluoro cytosine
  modified_base 13: mod_base = OTHER; note = 2'-O-methyl adenosine phosphorothioate
  modified_base 14: mod_base = OTHER; note = 2'-fluoro guanosine phosphorothioate
  modified_base 15: mod_base = OTHER; note = 2'-O-methyl adenosine phosphorothioate
  modified_base 16: mod_base = OTHER; note = 2'-fluoro adenosine phosphorothioate
  modified_base 17: mod_base = OTHER; note = 2'-O-methyl adenosine phosphorothioate
  modified_base 18: mod_base = OTHER; note = 2'-O-methyl cytosine phosphorothioate
  modified_base 19: mod_base = OTHER; note = 2'-O-methyl cytosine phosphorothioate
  modified_base 20: mod_base = OTHER; note = 2'-fluoro uridine
tccagttggagcagaaacct

SEQ ID NO: 415 - RNA, 20 nt, synthetic construct
  source 1..20: mol_type = other RNA
  modified_base 1: mod_base = OTHER; note = 5' phosphate 2'-O-methyl uridine phosphorothioate
  modified_base 2: mod_base = OTHER; note = 2'-fluoro cytosine phosphorothioate
  modified_base 3: mod_base = OTHER; note = 2'-O-methyl uridine
  modified_base 4: mod_base = OTHER; note = 2'-fluoro cytosine
  modified_base 5: mod_base = OTHER; note = 2'-fluoro cytosine
  modified_base 6: mod_base = OTHER; note = 2'-fluoro adenosine
  modified_base 7: mod_base = OTHER; note = 2'-O-methyl adenosine
  modified_base 8: mod_base = OTHER; note = 2'-fluoro guanosine
  modified_base 9: mod_base = OTHER; note = 2'-O-methyl cytosine
  modified_base 10: mod_base = OTHER; note = 2'-fluoro adenosine
  modified_base 11: mod_base = OTHER; note = 2'-O-methyl guanosine
  modified_base 12: mod_base = OTHER; note = 2'-fluoro adenosine
  modified_base 13: mod_base = OTHER; note = 2'-O-methyl uridine phosphorothioate
  modified_base 14: mod_base = OTHER; note = 2'-fluoro guanosine phosphorothioate
  modified_base 15: mod_base = OTHER; note = 2'-O-methyl guanosine phosphorothioate
  modified_base 16: mod_base = OTHER; note = 2'-fluoro adenosine phosphorothioate
  modified_base 17: mod_base = OTHER; note = 2'-O-methyl uridine phosphorothioate
  modified_base 18: mod_base = OTHER; note = 2'-O-methyl guanosine phosphorothioate
  modified_base 19: mod_base = OTHER; note = 2'-O-methyl adenosine phosphorothioate
  modified_base 20: mod_base = OTHER; note = 2'-fluoro cytosine
tctccaagcagatggatgac

SEQ ID NO: 416 - RNA, 20 nt, synthetic construct
  source 1..20: mol_type = other RNA
  modified_base 1: mod_base = OTHER; note = 5' phosphate 2'-O-methyl uridine phosphorothioate
  modified_base 2: mod_base = OTHER; note = 2'-fluoro uridine phosphorothioate
  modified_base 3: mod_base = OTHER; note = 2'-O-methyl uridine
  modified_base 4: mod_base = OTHER; note = 2'-fluoro guanosine
  modified_base 5: mod_base = OTHER; note = 2'-fluoro guanosine
  modified_base 6: mod_base = OTHER; note = 2'-fluoro guanosine
  modified_base 7: mod_base = OTHER; note = 2'-O-methyl adenosine
  modified_base 8: mod_base = OTHER; note = 2'-fluoro cytosine
  modified_base 9: mod_base = OTHER; note = 2'-O-methyl guanosine
  modified_base 10: mod_base = OTHER; note = 2'-fluoro adenosine
  modified_base 11: mod_base = OTHER; note = 2'-O-methyl guanosine
  modified_base 12: mod_base = OTHER; note = 2'-fluoro cytosine
  modified_base 13: mod_base = OTHER; note = 2'-O-methyl cytosine phosphorothioate
  modified_base 14: mod_base = OTHER; note = 2'-fluoro uridine phosphorothioate
  modified_base 15: mod_base = OTHER; note = 2'-O-methyl cytosine phosphorothioate
  modified_base 16: mod_base = OTHER; note = 2'-fluoro adenosine phosphorothioate
  modified_base 17: mod_base = OTHER; note = 2'-O-methyl uridine phosphorothioate
  modified_base 18: mod_base = OTHER; note = 2'-O-methyl cytosine phosphorothioate
  modified_base 19: mod_base = OTHER; note = 2'-O-methyl adenosine phosphorothioate
  modified_base 20: mod_base = OTHER; note = 2'-fluoro adenosine
tttgggacgagcctcatcaa

SEQ ID NO: 417 - RNA, 20 nt, synthetic construct
  source 1..20: mol_type = other RNA
  modified_base 1: mod_base = OTHER; note = 5' phosphate 2'-O-methyl uridine phosphorothioate
  modified_base 2: mod_base = OTHER; note = 2'-fluoro guanosine phosphorothioate
  modified_base 3: mod_base = OTHER; note = 2'-O-methyl uridine
  modified_base 4: mod_base = OTHER; note = 2'-fluoro uridine
  modified_base 5: mod_base = OTHER; note = 2'-fluoro cytosine
  modified_base 6: mod_base = OTHER; note = 2'-fluoro uridine
  modified_base 7: mod_base = OTHER; note = 2'-O-methyl adenosine
  modified_base 8: mod_base = OTHER; note = 2'-fluoro guanosine
  modified_base 9: mod_base = OTHER; note = 2'-O-methyl cytosine
  modified_base 10: mod_base = OTHER; note = 2'-fluoro uridine
  modified_base 11: mod_base = OTHER; note = 2'-O-methyl guanosine
  modified_base 12: mod_base = OTHER; note = 2'-fluoro cytosine
  modified_base 13: mod_base = OTHER; note = 2'-O-methyl adenosine phosphorothioate
  modified_base 14: mod_base = OTHER; note = 2'-fluoro adenosine phosphorothioate
  modified_base 15: mod_base = OTHER; note = 2'-O-methyl cytosine phosphorothioate
  modified_base 16: mod_base = OTHER; note = 2'-fluoro cytosine phosphorothioate
  modified_base 17: mod_base = OTHER; note = 2'-O-methyl uridine phosphorothioate
  modified_base 18: mod_base = OTHER; note = 2'-O-methyl cytosine phosphorothioate
  modified_base 19: mod_base = OTHER; note = 2'-O-methyl guanosine phosphorothioate
  modified_base 20: mod_base = OTHER; note = 2'-fluoro guanosine
tgttctagctgcaacctcgg

SEQ ID NO: 418 - RNA, 20 nt, synthetic construct
  source 1..20: mol_type = other RNA
  modified_base 1: mod_base = OTHER; note = 5' phosphate 2'-O-methyl uridine phosphorothioate
  modified_base 2: mod_base = OTHER; note = 2'-fluoro uridine phosphorothioate
  modified_base 3: mod_base = OTHER; note = 2'-O-methyl uridine
  modified_base 4: mod_base = OTHER; note = 2'-fluoro cytosine
  modified_base 5: mod_base = OTHER; note = 2'-fluoro adenosine
  modified_base 6: mod_base = OTHER; note = 2'-fluoro guanosine
  modified_base 7: mod_base = OTHER; note = 2'-O-methyl cytosine
  modified_base 8: mod_base = OTHER; note = 2'-fluoro adenosine
  modified_base 9: mod_base = OTHER; note = 2'-O-methyl adenosine
  modified_base 10: mod_base = OTHER; note = 2'-fluoro cytosine
  modified_base 11: mod_base = OTHER; note = 2'-O-methyl uridine
  modified_base 12: mod_base = OTHER; note = 2'-fluoro guanosine
  modified_base 13: mod_base = OTHER; note = 2'-O-methyl cytosine phosphorothioate
  modified_base 14: mod_base = OTHER; note = 2'-fluoro uridine phosphorothioate
  modified_base 15: mod_base = OTHER; note = 2'-O-methyl guanosine phosphorothioate
  modified_base 16: mod_base = OTHER; note = 2'-fluoro adenosine phosphorothioate
  modified_base 17: mod_base = OTHER; note = 2'-O-methyl adenosine phosphorothioate
  modified_base 18: mod_base = OTHER; note = 2'-O-methyl cytosine phosphorothioate
  modified_base 19: mod_base = OTHER; note = 2'-O-methyl adenosine phosphorothioate
  modified_base 20: mod_base = OTHER; note = 2'-fluoro cytosine
tttcagcaactgctgaacac

SEQ ID NO: 419 - RNA, 20 nt, synthetic construct
  source 1..20: mol_type = other RNA
  modified_base 1: mod_base = OTHER; note = 5' phosphate 2'-O-methyl uridine phosphorothioate
  modified_base 2: mod_base = OTHER; note = 2'-fluoro cytosine phosphorothioate
  modified_base 3: mod_base = OTHER; note = 2'-O-methyl uridine
  modified_base 4: mod_base = OTHER; note = 2'-fluoro guanosine
  modified_base 5: mod_base = OTHER; note = 2'-fluoro guanosine
  modified_base 6: mod_base = OTHER; note = 2'-fluoro uridine
  modified_base 7: mod_base = OTHER; note = 2'-O-methyl guanosine
  modified_base 8: mod_base = OTHER; note = 2'-fluoro uridine
  modified_base 9: mod_base = OTHER; note = 2'-O-methyl cytosine
  modified_base 10: mod_base = OTHER; note = 2'-fluoro uridine
  modified_base 11: mod_base = OTHER; note = 2'-O-methyl cytosine
  modified_base 12: mod_base = OTHER; note = 2'-fluoro uridine
  modified_base 13: mod_base = OTHER; note = 2'-O-methyl guanosine phosphorothioate
  modified_base 14: mod_base = OTHER; note = 2'-fluoro uridine phosphorothioate
  modified_base 15: mod_base = OTHER; note = 2'-O-methyl guanosine phosphorothioate
  modified_base 16: mod_base = OTHER; note = 2'-fluoro cytosine phosphorothioate
  modified_base 17: mod_base = OTHER; note = 2'-O-methyl uridine phosphorothioate
  modified_base 18: mod_base = OTHER; note = 2'-O-methyl adenosine phosphorothioate
  modified_base 19: mod_base = OTHER; note = 2'-O-methyl adenosine phosphorothioate
  modified_base 20: mod_base = OTHER; note = 2'-fluoro cytosine
tctggtgtctctgtgctaac

SEQ ID NO: 420 - RNA, 20 nt, synthetic construct
  source 1..20: mol_type = other RNA
  modified_base 1: mod_base = OTHER; note = 5' phosphate 2'-O-methyl uridine phosphorothioate
  modified_base 2: mod_base = OTHER; note = 2'-fluoro guanosine phosphorothioate
  modified_base 3: mod_base = OTHER; note = 2'-O-methyl uridine
  modified_base 4: mod_base = OTHER; note = 2'-fluoro adenosine
  modified_base 5: mod_base = OTHER; note = 2'-fluoro guanosine
  modified_base 6: mod_base = OTHER; note = 2'-fluoro adenosine
  modified_base 7: mod_base = OTHER; note = 2'-O-methyl guanosine
  modified_base 8: mod_base = OTHER; note = 2'-fluoro uridine
  modified_base 9: mod_base = OTHER; note = 2'-O-methyl uridine
  modified_base 10: mod_base = OTHER; note = 2'-fluoro uridine
  modified_base 11: mod_base = OTHER; note = 2'-O-methyl guanosine
  modified_base 12: mod_base = OTHER; note = 2'-fluoro cytosine
  modified_base 13: mod_base = OTHER; note = 2'-O-methyl uridine phosphorothioate
  modified_base 14: mod_base = OTHER; note = 2'-fluoro guanosine phosphorothioate
  modified_base 15: mod_base = OTHER; note = 2'-O-methyl adenosine phosphorothioate
  modified_base 16: mod_base = OTHER; note = 2'-fluoro adenosine phosphorothioate
  modified_base 17: mod_base = OTHER; note = 2'-O-methyl guanosine phosphorothioate
  modified_base 18: mod_base = OTHER; note = 2'-O-methyl adenosine phosphorothioate
  modified_base 19: mod_base = OTHER; note = 2'-O-methyl adenosine phosphorothioate
  modified_base 20: mod_base = OTHER; note = 2'-fluoro adenosine
tgtagagtttgctgaagaaa

SEQ ID NO: 421 - RNA, 20 nt, synthetic construct
  source 1..20: mol_type = other RNA
  modified_base 1: mod_base = OTHER; note = 5' phosphate 2'-O-methyl uridine phosphorothioate
  modified_base 2: mod_base = OTHER; note = 2'-fluoro uridine phosphorothioate
  modified_base 3: mod_base = OTHER; note = 2'-O-methyl uridine
  modified_base 4: mod_base = OTHER; note = 2'-fluoro cytosine
  modified_base 5: mod_base = OTHER; note = 2'-fluoro uridine
  modified_base 6: mod_base = OTHER; note = 2'-fluoro uridine
  modified_base 7: mod_base = OTHER; note = 2'-O-methyl guanosine
  modified_base 8: mod_base = OTHER; note = 2'-fluoro guanosine
  modified_base 9: mod_base = OTHER; note = 2'-O-methyl guanosine
  modified_base 10: mod_base = OTHER; note = 2'-fluoro adenosine
  modified_base 11: mod_base = OTHER; note = 2'-O-methyl cytosine
  modified_base 12: mod_base = OTHER; note = 2'-fluoro uridine
  modified_base 13: mod_base = OTHER; note = 2'-O-methyl cytosine phosphorothioate
  modified_base 14: mod_base = OTHER; note = 2'-fluoro adenosine phosphorothioate
  modified_base 15: mod_base = OTHER; note = 2'-O-methyl cytosine phosphorothioate
  modified_base 16: mod_base = OTHER; note = 2'-fluoro guanosine phosphorothioate
  modified_base 17: mod_base = OTHER; note = 2'-O-methyl guanosine phosphorothioate
  modified_base 18: mod_base = OTHER; note = 2'-O-methyl guanosine phosphorothioate
  modified_base 19: mod_base = OTHER; note = 2'-O-methyl cytosine phosphorothioate
  modified_base 20: mod_base = OTHER; note = 2'-fluoro adenosine
tttcttgggactcacgggca

SEQ ID NO: 422 - RNA, 20 nt, synthetic construct
  source 1..20: mol_type = other RNA
  modified_base 1: mod_base = OTHER; note = 5' phosphate 2'-O-methyl uridine phosphorothioate
  modified_base 2: mod_base = OTHER; note = 2'-fluoro uridine phosphorothioate
  modified_base 3: mod_base = OTHER; note = 2'-O-methyl uridine
  modified_base 4: mod_base = OTHER; note = 2'-fluoro cytosine
  modified_base 5: mod_base = OTHER; note = 2'-fluoro adenosine
  modified_base 6: mod_base = OTHER; note = 2'-fluoro cytosine
  modified_base 7: mod_base = OTHER; note = 2'-O-methyl adenosine
  modified_base 8: mod_base = OTHER; note = 2'-fluoro guanosine
  modified_base 9: mod_base = OTHER; note = 2'-O-methyl adenosine
  modified_base 10: mod_base = OTHER; note = 2'-fluoro uridine
  modified_base 11: mod_base = OTHER; note = 2'-O-methyl uridine
  modified_base 12: mod_base = OTHER; note = 2'-fluoro guanosine
  modified_base 13: mod_base = OTHER; note = 2'-O-methyl uridine phosphorothioate
  modified_base 14: mod_base = OTHER; note = 2'-fluoro cytosine phosphorothioate
  modified_base 15: mod_base = OTHER; note = 2'-O-methyl adenosine phosphorothioate
  modified_base 16: mod_base = OTHER; note = 2'-fluoro guanosine phosphorothioate
  modified_base 17: mod_base = OTHER; note = 2'-O-methyl adenosine phosphorothioate
  modified_base 18: mod_base = OTHER; note = 2'-O-methyl cytosine phosphorothioate
  modified_base 19: mod_base = OTHER; note = 2'-O-methyl adenosine phosphorothioate
  modified_base 20: mod_base = OTHER; note = 2'-fluoro guanosine
tttcacagattgtcagacag

SEQ ID NO: 423 - RNA, 20 nt, synthetic construct
  source 1..20: mol_type = other RNA
  modified_base 1: mod_base = OTHER; note = 5' phosphate 2'-O-methyl uridine phosphorothioate
  modified_base 2: mod_base = OTHER; note = 2'-fluoro uridine phosphorothioate
  modified_base 3: mod_base = OTHER; note = 2'-O-methyl cytosine
  modified_base 4: mod_base = OTHER; note = 2'-fluoro adenosine
  modified_base 5: mod_base = OTHER; note = 2'-fluoro guanosine
  modified_base 6: mod_base = OTHER; note = 2'-fluoro uridine
  modified_base 7: mod_base = OTHER; note = 2'-O-methyl guanosine
  modified_base 8: mod_base = OTHER; note = 2'-fluoro guanosine
  modified_base 9: mod_base = OTHER; note = 2'-O-methyl adenosine
  modified_base 10: mod_base = OTHER; note = 2'-fluoro cytosine
  modified_base 11: mod_base = OTHER; note = 2'-O-methyl uridine
  modified_base 12: mod_base = OTHER; note = 2'-fluoro guanosine
  modified_base 13: mod_base = OTHER; note = 2'-O-methyl guanosine phosphorothioate
  modified_base 14: mod_base = OTHER; note = 2'-fluoro cytosine phosphorothioate
  modified_base 15: mod_base = OTHER; note = 2'-O-methyl cytosine phosphorothioate
  modified_base 16: mod_base = OTHER; note = 2'-fluoro adenosine phosphorothioate
  modified_base 17: mod_base = OTHER; note = 2'-O-methyl adenosine phosphorothioate
  modified_base 18: mod_base = OTHER; note = 2'-O-methyl uridine phosphorothioate
  modified_base 19: mod_base = OTHER; note = 2'-O-methyl guanosine phosphorothioate
  modified_base 20: mod_base = OTHER; note = 2'-fluoro uridine
ttcagtggactggccaatgt

SEQ ID NO: 424 - RNA, 20 nt, synthetic construct
  source 1..20: mol_type = other RNA
  modified_base 1: mod_base = OTHER; note = 5' phosphate 2'-O-methyl uridine phosphorothioate
  modified_base 2: mod_base = OTHER; note = 2'-fluoro guanosine phosphorothioate
  modified_base 3: mod_base = OTHER; note = 2'-O-methyl guanosine
  modified_base 4: mod_base = OTHER; note = 2'-fluoro uridine
  modified_base 5: mod_base = OTHER; note = 2'-fluoro adenosine
  modified_base 6: mod_base = OTHER; note = 2'-fluoro uridine
  modified_base 7: mod_base = OTHER; note = 2'-O-methyl cytosine
  modified_base 8: mod_base = OTHER; note = 2'-fluoro cytosine
  modified_base 9: mod_base = OTHER; note = 2'-O-methyl cytosine
  modified_base 10: mod_base = OTHER; note = 2'-fluoro adenosine
  modified_base 11: mod_base = OTHER; note = 2'-O-methyl guanosine
  modified_base 12: mod_base = OTHER; note = 2'-fluoro guanosine
  modified_base 13: mod_base = OTHER; note = 2'-O-methyl adenosine phosphorothioate
  modified_base 14: mod_base = OTHER; note = 2'-fluoro uridine phosphorothioate
  modified_base 15: mod_base = OTHER; note = 2'-O-methyl cytosine phosphorothioate
  modified_base 16: mod_base = OTHER; note = 2'-fluoro uridine phosphorothioate
  modified_base 17: mod_base = OTHER; note = 2'-O-methyl cytosine phosphorothioate
  modified_base 18: mod_base = OTHER; note = 2'-O-methyl uridine phosphorothioate
  modified_base 19: mod_base = OTHER; note = 2'-O-methyl uridine phosphorothioate
  modified_base 20: mod_base = OTHER; note = 2'-fluoro cytosine
tggtatcccaggatctcttc

SEQ ID NO: 425 - RNA, 15 nt, synthetic construct
  source 1..15: mol_type = other RNA
  modified_base 1: mod_base = OTHER; note = 2'-O-methyl cytosine phosphorothioate
  modified_base 2: mod_base = OTHER; note = 2'-O-methyl adenosine phosphorothioate
  modified_base 3: mod_base = OTHER; note = 2'-fluoro cytosine
  modified_base 4: mod_base = OTHER; note = 2'-O-methyl cytosine
  modified_base 5: mod_base = OTHER; note = 2'-fluoro guanosine
  modified_base 6: mod_base = OTHER; note = 2'-O-methyl adenosine
  modified_base 7: mod_base = OTHER; note = 2'-fluoro cytosine
  modified_base 8: mod_base = OTHER; note = 2'-O-methyl cytosine
  modified_base 9: mod_base = OTHER; note = 2'-fluoro adenosine
  modified_base 10: mod_base = OTHER; note = 2'-O-methyl adenosine
  modified_base 11: mod_base = OTHER; note = 2'-O-methyl adenosine
  modified_base 12: mod_base = OTHER; note = 2'-O-methyl guanosine
  modified_base 13: mod_base = OTHER; note = 2'-fluoro adenosine phosphorothioate
  modified_base 14: mod_base = OTHER; note = 2'-O-methyl adenosine phosphorothioate
  modified_base 15: mod_base = OTHER; note = 2'-O-methyl adenosine triethylene glycol
caccgaccaaagaaa

SEQ ID NO: 426 - RNA, 15 nt, synthetic construct
  source 1..15: mol_type = other RNA
  modified_base 1: mod_base = OTHER; note = 2'-O-methyl cytosine phosphorothioate
  modified_base 2: mod_base = OTHER; note = 2'-O-methyl adenosine phosphorothioate
  modified_base 3: mod_base = OTHER; note = 2'-fluoro guanosine
  modified_base 4: mod_base = OTHER; note = 2'-O-methyl cytosine
  modified_base 5: mod_base = OTHER; note = 2'-fluoro cytosine
  modified_base 6: mod_base = OTHER; note = 2'-O-methyl adenosine
  modified_base 7: mod_base = OTHER; note = 2'-fluoro cytosine
  modified_base 8: mod_base = OTHER; note = 2'-O-methyl cytosine
  modified_base 9: mod_base = OTHER; note = 2'-fluoro adenosine
  modified_base 10: mod_base = OTHER; note = 2'-O-methyl adenosine
  modified_base 11: mod_base = OTHER; note = 2'-O-methyl guanosine
  modified_base 12: mod_base = OTHER; note = 2'-O-methyl adenosine
  modified_base 13: mod_base = OTHER; note = 2'-fluoro adenosine phosphorothioate
  modified_base 14: mod_base = OTHER; note = 2'-O-methyl adenosine phosphorothioate
  modified_base 15: mod_base = OTHER; note = 2'-O-methyl adenosine triethylene glycol
cagccaccaagaaaa

SEQ ID NO: 427 - RNA, 15 nt, synthetic construct
  source 1..15: mol_type = other RNA
  modified_base 1: mod_base = OTHER; note = 2'-O-methyl cytosine phosphorothioate
  modified_base 2: mod_base = OTHER; note = 2'-O-methyl cytosine phosphorothioate
  modified_base 3: mod_base = OTHER; note = 2'-fluoro guanosine
  modified_base 4: mod_base = OTHER; note = 2'-O-methyl adenosine
  modified_base 5: mod_base = OTHER; note = 2'-fluoro cytosine
  modified_base 6: mod_base = OTHER; note = 2'-O-methyl adenosine
  modified_base 7: mod_base = OTHER; note = 2'-fluoro guanosine
  modified_base 8: mod_base = OTHER; note = 2'-O-methyl uridine
  modified_base 9: mod_base = OTHER; note = 2'-fluoro uridine
  modified_base 10: mod_base = OTHER; note = 2'-O-methyl cytosine
  modified_base 11: mod_base = OTHER; note = 2'-O-methyl uridine
  modified_base 12: mod_base = OTHER; note = 2'-O-methyl guanosine
  modified_base 13: mod_base = OTHER; note = 2'-fluoro adenosine phosphorothioate
  modified_base 14: mod_base = OTHER; note = 2'-O-methyl adenosine phosphorothioate
  modified_base 15: mod_base = OTHER; note = 2'-O-methyl adenosine triethylene glycol
ccgacagttctgaaa

SEQ ID NO: 428 - RNA, 15 nt, synthetic construct
  source 1..15: mol_type = other RNA
  modified_base 1: mod_base = OTHER; note = 2'-O-methyl cytosine phosphorothioate
  modified_base 2: mod_base = OTHER; note = 2'-O-methyl adenosine phosphorothioate
  modified_base 3: mod_base = OTHER; note = 2'-fluoro uridine
  modified_base 4: mod_base = OTHER; note = 2'-O-methyl guanosine
  modified_base 5: mod_base = OTHER; note = 2'-fluoro uridine
  modified_base 6: mod_base = OTHER; note = 2'-O-methyl adenosine
  modified_base 7: mod_base = OTHER; note = 2'-fluoro cytosine
  modified_base 8: mod_base = OTHER; note = 2'-O-methyl adenosine
  modified_base 9: mod_base = OTHER; note = 2'-fluoro cytosine
  modified_base 10: mod_base = OTHER; note = 2'-O-methyl adenosine
  modified_base 11: mod_base = OTHER; note = 2'-O-methyl guanosine
  modified_base 12: mod_base = OTHER; note = 2'-O-methyl guanosine
  modified_base 13: mod_base = OTHER; note = 2'-fluoro adenosine phosphorothioate
  modified_base 14: mod_base = OTHER; note = 2'-O-methyl adenosine phosphorothioate
  modified_base 15: mod_base = OTHER; note = 2'-O-methyl adenosine triethylene glycol
catgtacacaggaaa

SEQ ID NO: 429 - RNA, 15 nt, synthetic construct
  source 1..15: mol_type = other RNA
  modified_base 1: mod_base = OTHER; note = 2'-O-methyl adenosine phosphorothioate
  modified_base 2: mod_base = OTHER; note = 2'-O-methyl adenosine phosphorothioate
  modified_base 3: mod_base = OTHER; note = 2'-fluoro cytosine
  modified_base 4: mod_base = OTHER; note = 2'-O-methyl uridine
  modified_base 5: mod_base = OTHER; note = 2'-fluoro cytosine
  modified_base 6: mod_base = OTHER; note = 2'-O-methyl uridine
  modified_base 7: mod_base = OTHER; note = 2'-fluoro adenosine
  modified_base 8: mod_base = OTHER; note = 2'-O-methyl cytosine
  modified_base 9: mod_base = OTHER; note = 2'-fluoro adenosine
  modified_base 10: mod_base = OTHER; note = 2'-O-methyl adenosine
  modified_base 11: mod_base = OTHER; note = 2'-O-methyl guanosine
  modified_base 12: mod_base = OTHER; note = 2'-O-methyl guanosine
  modified_base 13: mod_base = OTHER; note = 2'-fluoro adenosine phosphorothioate
  modified_base 14: mod_base = OTHER; note = 2'-O-methyl adenosine phosphorothioate
  modified_base 15: mod_base = OTHER; note = 2'-O-methyl adenosine triethylene glycol
aactctacaaggaaa

SEQ ID NO: 430 - RNA, 15 nt, synthetic construct
  source 1..15: mol_type = other RNA
  modified_base 1: mod_base = OTHER; note = 2'-O-methyl guanosine phosphorothioate
  modified_base 2: mod_base = OTHER; note = 2'-O-methyl adenosine phosphorothioate
  modified_base 3: mod_base = OTHER; note = 2'-fluoro cytosine
  modified_base 4: mod_base = OTHER; note = 2'-O-methyl uridine
  modified_base 5: mod_base = OTHER; note = 2'-fluoro cytosine
  modified_base 6: mod_base = OTHER; note = 2'-O-methyl adenosine
  modified_base 7: mod_base = OTHER; note = 2'-fluoro uridine
  modified_base 8: mod_base = OTHER; note = 2'-O-methyl cytosine
  modified_base 9: mod_base = OTHER; note = 2'-fluoro cytosine
  modified_base 10: mod_base = OTHER; note = 2'-O-methyl adenosine
  modified_base 11: mod_base = OTHER; note = 2'-O-methyl guanosine
  modified_base 12: mod_base = OTHER; note = 2'-O-methyl uridine
  modified_base 13: mod_base = OTHER; note = 2'-fluoro adenosine phosphorothioate
  modified_base 14: mod_base = OTHER; note = 2'-O-methyl cytosine phosphorothioate
  modified_base 15: mod_base = OTHER; note = 2'-O-methyl adenosine triethylene glycol
gactcatccagtaca

SEQ ID NO: 431 - RNA, 15 nt, synthetic construct
  source 1..15: mol_type = other RNA
  modified_base 1: mod_base = OTHER; note = 2'-O-methyl cytosine phosphorothioate
  modified_base 2: mod_base = OTHER; note = 2'-O-methyl uridine phosphorothioate
  modified_base 3: mod_base = OTHER; note = 2'-fluoro adenosine
  modified_base 4: mod_base = OTHER; note = 2'-O-methyl cytosine
  modified_base 5: mod_base = OTHER; note = 2'-fluoro adenosine
  modified_base 6: mod_base = OTHER; note = 2'-O-methyl adenosine
  modified_base 7: mod_base = OTHER; note = 2'-fluoro guanosine
  modified_base 8: mod_base = OTHER; note = 2'-O-methyl guanosine
  modified_base 9: mod_base = OTHER; note = 2'-fluoro adenosine
  modified_base 10: mod_base = OTHER; note = 2'-O-methyl adenosine
  modified_base 11: mod_base = OTHER; note = 2'-O-methyl adenosine
  modified_base 12: mod_base = OTHER; note = 2'-O-methyl uridine
  modified_base 13: mod_base = OTHER; note = 2'-fluoro uridine phosphorothioate
  modified_base 14: mod_base = OTHER; note = 2'-O-methyl adenosine phosphorothioate
  modified_base 15: mod_base = OTHER; note = 2'-O-methyl adenosine triethylene glycol
ctacaaggaaattaa

SEQ ID NO: 432 - RNA, 15 nt, synthetic construct
  source 1..15: mol_type = other RNA
  modified_base 1: mod_base = OTHER; note = 2'-O-methyl adenosine phosphorothioate
  modified_base 2: mod_base = OTHER; note = 2'-O-methyl guanosine phosphorothioate
  modified_base 3: mod_base = OTHER; note = 2'-fluoro cytosine
  modified_base 4: mod_base = OTHER; note = 2'-O-methyl adenosine
  modified_base 5: mod_base = OTHER; note = 2'-fluoro guanosine
  modified_base 6: mod_base = OTHER; note = 2'-O-methyl uridine
  modified_base 7: mod_base = OTHER; note = 2'-fluoro uridine
  modified_base 8: mod_base = OTHER; note = 2'-O-methyl uridine
  modified_base 9: mod_base = OTHER; note = 2'-fluoro guanosine
  modified_base 10: mod_base = OTHER; note = 2'-O-methyl adenosine
  modified_base 11: mod_base = OTHER; note = 2'-O-methyl adenosine
  modified_base 12: mod_base = OTHER; note = 2'-O-methyl uridine
  modified_base 13: mod_base = OTHER; note = 2'-fluoro adenosine phosphorothioate
  modified_base 14: mod_base = OTHER; note = 2'-O-methyl cytosine phosphorothioate
  modified_base 15: mod_base = OTHER; note = 2'-O-methyl adenosine triethylene glycol
agcagtttgaataca

SEQ ID NO: 433 - RNA, 15 nt, synthetic construct
  source 1..15: mol_type = other RNA
  modified_base 1: mod_base = OTHER; note = 2'-O-methyl cytosine phosphorothioate
  modified_base 2: mod_base = OTHER; note = 2'-O-methyl adenosine phosphorothioate
  modified_base 3: mod_base = OTHER; note = 2'-fluoro guanosine
  modified_base 4: mod_base = OTHER; note = 2'-O-methyl cytosine
  modified_base 5: mod_base = OTHER; note = 2'-fluoro adenosine
  modified_base 6: mod_base = OTHER; note = 2'-O-methyl adenosine
  modified_base 7: mod_base = OTHER; note = 2'-fluoro adenosine
  modified_base 8: mod_base = OTHER; note = 2'-O-methyl cytosine
  modified_base 9: mod_base = OTHER; note = 2'-fluoro uridine
  modified_base 10: mod_base = OTHER; note = 2'-O-methyl cytosine
  modified_base 11: mod_base = OTHER; note = 2'-O-methyl uridine
  modified_base 12: mod_base = OTHER; note = 2'-O-methyl adenosine
  modified_base 13: mod_base = OTHER; note = 2'-fluoro cytosine phosphorothioate
  modified_base 14: mod_base = OTHER; note = 2'-O-methyl adenosine phosphorothioate
  modified_base 15: mod_base = OTHER; note = 2'-O-methyl adenosine triethylene glycol
cagcaaactctacaa

SEQ ID NO: 434 - RNA, 15 nt, synthetic construct
  source 1..15: mol_type = other RNA
  modified_base 1: mod_base = OTHER; note = 2'-O-methyl cytosine phosphorothioate
  modified_base 2: mod_base = OTHER; note = 2'-O-methyl adenosine phosphorothioate
  modified_base 3: mod_base = OTHER; note = 2'-fluoro guanosine
  modified_base 4: mod_base = OTHER; note = 2'-O-methyl guanosine
  modified_base 5: mod_base = OTHER; note = 2'-fluoro adenosine
  modified_base 6: mod_base = OTHER; note = 2'-O-methyl adenosine
  modified_base 7: mod_base = OTHER; note = 2'-fluoro adenosine
  modified_base 8: mod_base = OTHER; note = 2'-O-methyl guanosine
  modified_base 9: mod_base = OTHER; note = 2'-fluoro guanosine
  modified_base 10: mod_base = OTHER; note = 2'-O-methyl adenosine
  modified_base 11: mod_base = OTHER; note = 2'-O-methyl guanosine
  modified_base 12: mod_base = OTHER; note = 2'-O-methyl adenosine
  modified_base 13: mod_base = OTHER; note = 2'-fluoro adenosine phosphorothioate
  modified_base 14: mod_base = OTHER; note = 2'-O-methyl adenosine phosphorothioate
  modified_base 15: mod_base = OTHER; note = 2'-O-methyl adenosine triethylene glycol
caggaaaggagaaaa

SEQ ID NO: 435 - RNA, 15 nt, synthetic construct
  source 1..15: mol_type = other RNA
  modified_base 1: mod_base = OTHER; note = 2'-O-methyl cytosine phosphorothioate
  modified_base 2: mod_base = OTHER; note = 2'-O-methyl cytosine phosphorothioate
  modified_base 3: mod_base = OTHER; note = 2'-fluoro cytosine
  modified_base 4: mod_base = OTHER; note = 2'-O-methyl cytosine
  modified_base 5: mod_base = OTHER; note = 2'-fluoro uridine
  modified_base 6: mod_base = OTHER; note = 2'-O-methyl guanosine
  modified_base 7: mod_base = OTHER; note = 2'-fluoro cytosine
  modified_base 8: mod_base = OTHER; note = 2'-O-methyl uridine
  modified_base 9: mod_base = OTHER; note = 2'-fluoro guanosine
  modified_base 10: mod_base = OTHER; note = 2'-O-methyl cytosine
  modified_base 11: mod_base = OTHER; note = 2'-O-methyl adenosine
  modified_base 12: mod_base = OTHER; note = 2'-O-methyl guanosine
  modified_base 13: mod_base = OTHER; note = 2'-fluoro adenosine phosphorothioate
  modified_base 14: mod_base = OTHER; note = 2'-O-methyl adenosine phosphorothioate
  modified_base 15: mod_base = OTHER; note = 2'-O-methyl adenosine triethylene glycol
cccctgctgcagaaa

SEQ ID NO: 436 - RNA, 15 nt, synthetic construct
  source 1..15: mol_type = other RNA
  modified_base 1: mod_base = OTHER; note = 2'-O-methyl cytosine phosphorothioate
  modified_base 2: mod_base = OTHER; note = 2'-O-methyl uridine phosphorothioate
  modified_base 3: mod_base = OTHER; note = 2'-fluoro adenosine
  modified_base 4: mod_base = OTHER; note = 2'-O-methyl cytosine
  modified_base 5: mod_base = OTHER; note = 2'-fluoro cytosine
  modified_base 6: mod_base = OTHER; note = 2'-O-methyl adenosine
  modified_base 7: mod_base = OTHER; note = 2'-fluoro adenosine
  modified_base 8: mod_base = OTHER; note = 2'-O-methyl guanosine
  modified_base 9: mod_base = OTHER; note = 2'-fluoro cytosine
  modified_base 10: mod_base = OTHER; note = 2'-O-methyl adenosine
  modified_base 11: mod_base = OTHER; note = 2'-O-methyl uridine
  modified_base 12: mod_base = OTHER; note = 2'-O-methyl cytosine
  modified_base 13: mod_base = OTHER; note = 2'-fluoro adenosine phosphorothioate
  modified_base 14: mod_base = OTHER; note = 2'-O-methyl cytosine phosphorothioate
  modified_base 15: mod_base = OTHER; note = 2'-O-methyl adenosine triethylene glycol
ctaccaagcatcaca

SEQ ID NO: 437 - RNA, 15 nt, synthetic construct
  source 1..15: mol_type = other RNA
  modified_base 1: mod_base = OTHER; note = 2'-O-methyl uridine phosphorothioate
  modified_base 2: mod_base = OTHER; note = 2'-O-methyl guanosine phosphorothioate
  modified_base 3: mod_base = OTHER; note = 2'-fluoro guanosine
  modified_base 4: mod_base = OTHER; note = 2'-O-methyl cytosine
  modified_base 5: mod_base = OTHER; note = 2'-fluoro adenosine
  modified_base 6: mod_base = OTHER; note = 2'-O-methyl adenosine
  modified_base 7: mod_base = OTHER; note = 2'-fluoro cytosine
  modified_base 8: mod_base = OTHER; note = 2'-O-methyl uridine
  modified_base 9: mod_base = OTHER; note = 2'-fluoro uridine
  modified_base 10: mod_base = OTHER; note = 2'-O-methyl uridine
  modified_base 11: mod_base = OTHER; note = 2'-O-methyl guanosine
  modified_base 12: mod_base = OTHER; note = 2'-O-methyl cytosine
  modified_base 13: mod_base = OTHER; note = 2'-fluoro guanosine phosphorothioate
  modified_base 14: mod_base = OTHER; note = 2'-O-methyl adenosine phosphorothioate
  modified_base 15: mod_base = OTHER; note = 2'-O-methyl adenosine triethylene glycol
tggcaactttgcgaa

SEQ ID NO: 438 - RNA, 15 nt, synthetic construct
  source 1..15: mol_type = other RNA
  modified_base 1: mod_base = OTHER; note = 2'-O-methyl adenosine phosphorothioate
  modified_base 2: mod_base = OTHER; note = 2'-O-methyl cytosine phosphorothioate
  modified_base 3: mod_base = OTHER; note = 2'-fluoro cytosine
  modified_base 4: mod_base = OTHER; note = 2'-O-methyl guanosine
  modified_base 5: mod_base = OTHER; note = 2'-fluoro adenosine
  modified_base 6: mod_base = OTHER; note = 2'-O-methyl guanosine
  modified_base 7: mod_base = OTHER; note = 2'-fluoro cytosine
  modified_base 8: mod_base = OTHER; note = 2'-O-methyl adenosine
  modified_base 9: mod_base = OTHER; note = 2'-fluoro guanosine
  modified_base 10: mod_base = OTHER; note = 2'-O-methyl adenosine
  modified_base 11: mod_base = OTHER; note = 2'-O-methyl cytosine
  modified_base 12: mod_base = OTHER; note = 2'-O-methyl adenosine
  modified_base 13: mod_base = OTHER; note = 2'-fluoro adenosine phosphorothioate
  modified_base 14: mod_base = OTHER; note = 2'-O-methyl guanosine phosphorothioate
  modified_base 15: mod_base = OTHER; note = 2'-O-methyl adenosine triethylene glycol
accgagcagacaaga

SEQ ID NO: 439 - RNA, 15 nt, synthetic construct
  source 1..15: mol_type = other RNA
  modified_base 1: mod_base = OTHER; note = 2'-O-methyl uridine phosphorothioate
  modified_base 2: mod_base = OTHER; note = 2'-O-methyl uridine phosphorothioate
  modified_base 3: mod_base = OTHER; note = 2'-fluoro guanosine
  modified_base 4: mod_base = OTHER; note = 2'-O-methyl cytosine
  modified_base 5: mod_base = OTHER; note = 2'-fluoro guanosine
  modified_base 6: mod_base = OTHER; note = 2'-O-methyl adenosine
  modified_base 7: mod_base = OTHER; note = 2'-fluoro adenosine
  modified_base 8: mod_base = OTHER; note = 2'-O-methyl cytosine
  modified_base 9: mod_base = OTHER; note = 2'-fluoro guanosine
  modified_base 10: mod_base = OTHER; note = 2'-O-methyl adenosine
  modified_base 11: mod_base = OTHER; note = 2'-O-methyl cytosine
  modified_base 12: mod_base = OTHER; note = 2'-O-methyl adenosine
  modified_base 13: mod_base = OTHER; note = 2'-fluoro adenosine phosphorothioate
  modified_base 14: mod_base = OTHER; note = 2'-O-methyl uridine phosphorothioate
  modified_base 15: mod_base = OTHER; note = 2'-O-methyl adenosine triethylene glycol
ttgcgaacgacaata

SEQ ID NO: 440 - RNA, 15 nt, synthetic construct
  source 1..15: mol_type = other RNA
  modified_base 1: mod_base = OTHER; note = 2'-O-methyl cytosine phosphorothioate
  modified_base 2: mod_base = OTHER; note = 2'-O-methyl guanosine phosphorothioate
  modified_base 3: mod_base = OTHER; note = 2'-fluoro adenosine
  modified_base 4: mod_base = OTHER; note = 2'-O-methyl uridine
  modified_base 5: mod_base = OTHER; note = 2'-fluoro uridine
  modified_base 6: mod_base = OTHER; note = 2'-O-methyl adenosine
  modified_base 7: mod_base = OTHER; note = 2'-fluoro uridine
  modified_base 8: mod_base = OTHER; note = 2'-O-methyl cytosine
  modified_base 9: mod_base = OTHER; note = 2'-fluoro cytosine
  modified_base 10: mod_base = OTHER; note = 2'-O-methyl cytosine
  modified_base 11: mod_base = OTHER; note = 2'-O-methyl adenosine
  modified_base 12: mod_base = OTHER; note = 2'-O-methyl adenosine
  modified_base 13: mod_base = OTHER; note = 2'-fluoro adenosine phosphorothioate
  modified_base 14: mod_base = OTHER; note = 2'-O-methyl cytosine phosphorothioate
  modified_base 15: mod_base = OTHER; note = 2'-O-methyl adenosine triethylene glycol
cgattatcccaaaca

SEQ ID NO: 441 - RNA, 15 nt, synthetic construct
  source 1..15: mol_type = other RNA
  modified_base 1: mod_base = OTHER; note = 2'-O-methyl cytosine phosphorothioate
  modified_base 2: mod_base = OTHER; note = 2'-O-methyl cytosine phosphorothioate
  modified_base 3: mod_base = OTHER; note = 2'-fluoro uridine
  modified_base 4: mod_base = OTHER; note = 2'-O-methyl cytosine
  modified_base 5: mod_base = OTHER; note = 2'-fluoro cytosine
  modified_base 6: mod_base = OTHER; note = 2'-O-methyl adenosine
  modified_base 7: mod_base = OTHER; note = 2'-fluoro uridine
  modified_base 8: mod_base = OTHER; note = 2'-O-methyl cytosine
  modified_base 9: mod_base = OTHER; note = 2'-fluoro adenosine
  modified_base 10: mod_base = OTHER; note = 2'-O-methyl uridine
  modified_base 11: mod_base = OTHER; note = 2'-O-methyl adenosine
  modified_base 12: mod_base = OTHER; note = 2'-O-methyl cytosine
  modified_base 13: mod_base = OTHER; note = 2'-fluoro adenosine phosphorothioate
  modified_base 14: mod_base = OTHER; note = 2'-O-methyl guanosine phosphorothioate
  modified_base 15: mod_base = OTHER; note = 2'-O-methyl adenosine triethylene glycol
cctccatcatacaga

SEQ ID NO: 442 - RNA, 15 nt, synthetic construct
  source 1..15: mol_type = other RNA
  modified_base 1: mod_base = OTHER; note = 2'-O-methyl guanosine phosphorothioate
  modified_base 2: mod_base = OTHER; note = 2'-O-methyl cytosine phosphorothioate
  modified_base 3: mod_base = OTHER; note = 2'-fluoro adenosine
  modified_base 4: mod_base = OTHER; note = 2'-O-methyl adenosine
  modified_base 5: mod_base = OTHER; note = 2'-fluoro guanosine
  modified_base 6: mod_base = OTHER; note = 2'-O-methyl adenosine
  modified_base 7: mod_base = OTHER; note = 2'-fluoro guanosine
  modified_base 8: mod_base = OTHER; note = 2'-O-methyl cytosine
  modified_base 9: mod_base = OTHER; note = 2'-fluoro guanosine
  modified_base 10: mod_base = OTHER; note = 2'-O-methyl guanosine
  modified_base 11: mod_base = OTHER; note = 2'-O-methyl guanosine
  modified_base 12: mod_base = OTHER; note = 2'-O-methyl uridine
  modified_base 13: mod_base = OTHER; note = 2'-fluoro adenosine phosphorothioate
  modified_base 14: mod_base = OTHER; note = 2'-O-methyl cytosine phosphorothioate
  modified_base 15: mod_base = OTHER; note = 2'-O-methyl adenosine triethylene glycol
gcaagagcgggtaca

SEQ ID NO: 443 - RNA, 15 nt, synthetic construct
  source 1..15: mol_type = other RNA
  modified_base 1: mod_base = OTHER; note = 2'-O-methyl guanosine phosphorothioate
  modified_base 2: mod_base = OTHER; note = 2'-O-methyl guanosine phosphorothioate
  modified_base 3: mod_base = OTHER; note = 2'-fluoro cytosine
  modified_base 4: mod_base = OTHER; note = 2'-O-methyl uridine
  modified_base 5: mod_base = OTHER; note = 2'-fluoro guanosine
  modified_base 6: mod_base = OTHER; note = 2'-O-methyl adenosine
  modified_base 7: mod_base = OTHER; note = 2'-fluoro uridine
  modified_base 8: mod_base = OTHER; note = 2'-O-methyl guanosine
  modified_base 9: mod_base = OTHER; note = 2'-fluoro cytosine
  modified_base 10: mod_base = OTHER; note = 2'-O-methyl adenosine
  modified_base 11: mod_base = OTHER; note = 2'-O-methyl guanosine
  modified_base 12: mod_base = OTHER; note = 2'-O-methyl guanosine
  modified_base 13: mod_base = OTHER; note = 2'-fluoro adenosine phosphorothioate
  modified_base 14: mod_base = OTHER; note = 2'-O-methyl adenosine phosphorothioate
  modified_base 15: mod_base = OTHER; note = 2'-O-methyl adenosine triethylene glycol
ggctgatgcaggaaa

SEQ ID NO: 444 - RNA, 15 nt, synthetic construct
  source 1..15: mol_type = other RNA
  modified_base 1: mod_base = OTHER; note = 2'-O-methyl cytosine phosphorothioate
  modified_base 2: mod_base = OTHER; note = 2'-O-methyl uridine phosphorothioate
  modified_base 3: mod_base = OTHER; note = 2'-fluoro uridine
  modified_base 4: mod_base = OTHER; note = 2'-O-methyl uridine
  modified_base 5: mod_base = OTHER; note = 2'-fluoro guanosine
  modified_base 6: mod_base = OTHER; note = 2'-O-methyl adenosine
  modified_base 7: mod_base = OTHER; note = 2'-fluoro uridine
  modified_base 8: mod_base = OTHER; note = 2'-O-methyl guanosine
  modified_base 9: mod_base = OTHER; note = 2'-fluoro guanosine
  modified_base 10: mod_base = OTHER; note = 2'-O-methyl adenosine
  modified_base 11: mod_base = OTHER; note = 2'-O-methyl cytosine
  modified_base 12: mod_base = OTHER; note = 2'-O-methyl uridine
  modified_base 13: mod_base = OTHER; note = 2'-fluoro cytosine phosphorothioate
  modified_base 14: mod_base = OTHER; note = 2'-O-methyl uridine phosphorothioate
  modified_base 15: mod_base = OTHER; note = 2'-O-methyl adenosine triethylene glycol
ctttgatggactcta

SEQ ID NO: 445 - RNA, 15 nt, synthetic construct
  source 1..15: mol_type = other RNA
  modified_base 1: mod_base = OTHER; note = 2'-O-methyl cytosine phosphorothioate
  modified_base 2: mod_base = OTHER; note = 2'-O-methyl guanosine phosphorothioate
  modified_base 3: mod_base = OTHER; note = 2'-fluoro cytosine
  modified_base 4: mod_base = OTHER; note = 2'-O-methyl uridine
  modified_base 5: mod_base = OTHER; note = 2'-fluoro adenosine
  modified_base 6: mod_base = OTHER; note = 2'-O-methyl uridine
  modified_base 7: mod_base = OTHER; note = 2'-fluoro guanosine
  modified_base 8: mod_base = OTHER; note = 2'-O-methyl guanosine
  modified_base 9: mod_base = OTHER; note = 2'-fluoro adenosine
  modified_base 10: mod_base = OTHER; note = 2'-O-methyl adenosine
  modified_base 11: mod_base = OTHER; note = 2'-O-methyl cytosine
  modified_base 12: mod_base = OTHER; note = 2'-O-methyl uridine
  modified_base 13: mod_base = OTHER; note = 2'-fluoro uridine phosphorothioate
  modified_base 14: mod_base = OTHER; note = 2'-O-methyl uridine phosphorothioate
  modified_base 15: mod_base = OTHER; note = 2'-O-methyl adenosine triethylene glycol
cgctatggaacttta

SEQ ID NO: 446 - RNA, 15 nt, synthetic construct
  source 1..15: mol_type = other RNA
  modified_base 1: mod_base = OTHER; note = 2'-O-methyl guanosine phosphorothioate
  modified_base 2: mod_base = OTHER; note = 2'-O-methyl uridine phosphorothioate
  modified_base 3: mod_base = OTHER; note = 2'-fluoro cytosine
  modified_base 4: mod_base = OTHER; note = 2'-O-methyl cytosine
  modified_base 5: mod_base = OTHER; note = 2'-fluoro uridine
  modified_base 6: mod_base = OTHER; note = 2'-O-methyl uridine
  modified_base 7: mod_base = OTHER; note = 2'-fluoro uridine
  modified_base 8: mod_base = OTHER; note = 2'-O-methyl cytosine
  modified_base 9: mod_base = OTHER; note = 2'-fluoro adenosine
  modified_base 10: mod_base = OTHER; note = 2'-O-methyl adenosine
  modified_base 11: mod_base = OTHER; note = 2'-O-methyl guanosine
  modified_base 12: mod_base = OTHER; note = 2'-O-methyl adenosine
  modified_base 13: mod_base = OTHER; note = 2'-fluoro adenosine phosphorothioate
  modified_base 14: mod_base = OTHER; note = 2'-O-methyl adenosine phosphorothioate
  modified_base 15: mod_base = OTHER; note = 2'-O-methyl adenosine triethylene glycol
gtcctttcaagaaaa

SEQ ID NO: 447 - RNA, 15 nt, synthetic construct
  source 1..15: mol_type = other RNA
  modified_base 1: mod_base = OTHER; note = 2'-O-methyl cytosine phosphorothioate
  modified_base 2: mod_base = OTHER; note = 2'-O-methyl adenosine phosphorothioate
  modified_base 3: mod_base = OTHER; note = 2'-fluoro uridine
  modified_base 4: mod_base = OTHER; note = 2'-O-methyl adenosine
  modified_base 5: mod_base = OTHER; note = 2'-fluoro adenosine
  modified_base 6: mod_base = OTHER; note = 2'-O-methyl adenosine
  modified_base 7: mod_base = OTHER; note = 2'-fluoro adenosine
  modified_base 8: mod_base = OTHER; note = 2'-O-methyl guanosine
  modified_base 9: mod_base = OTHER; note = 2'-fluoro cytosine
  modified_base 10: mod_base = OTHER; note = 2'-O-methyl adenosine
  modified_base 11: mod_base = OTHER; note = 2'-O-methyl cytosine
  modified_base 12: mod_base = OTHER; note = 2'-O-methyl uridine
  modified_base 13: mod_base = OTHER; note = 2'-fluoro guanosine phosphorothioate
  modified_base 14: mod_base = OTHER; note = 2'-O-methyl adenosine phosphorothioate
  modified_base 15: mod_base = OTHER; note = 2'-O-methyl adenosine triethylene glycol
cataaaagcactgaa

SEQ ID NO: 448 - RNA, 15 nt, synthetic construct
  source 1..15: mol_type = other RNA
  modified_base 1: mod_base = OTHER; note = 2'-O-methyl cytosine phosphorothioate
  modified_base 2: mod_base = OTHER; note = 2'-O-methyl guanosine phosphorothioate
  modified_base 3: mod_base = OTHER; note = 2'-fluoro guanosine
  modified_base 4: mod_base = OTHER; note = 2'-O-methyl adenosine
  modified_base 5: mod_base = OTHER; note = 2'-fluoro guanosine
  modified_base 6: mod_base = OTHER; note = 2'-O-methyl uridine
  modified_base 7: mod_base = OTHER; note = 2'-fluoro uridine
  modified_base 8: mod_base = OTHER; note = 2'-O-methyl cytosine
  modified_base 9: mod_base = OTHER; note = 2'-fluoro adenosine
  modified_base 10: mod_base = OTHER; note = 2'-O-methyl adenosine
  modified_base 11: mod_base = OTHER; note = 2'-O-methyl cytosine
  modified_base 12: mod_base = OTHER; note = 2'-O-methyl cytosine
  modified_base 13: mod_base = OTHER; note = 2'-fluoro uridine phosphorothioate
  modified_base 14: mod_base = OTHER; note = 2'-O-methyl guanosine phosphorothioate
  modified_base 15: mod_base = OTHER; note = 2'-O-methyl adenosine triethylene glycol
cggagttcaacctga

SEQ ID NO: 449 - RNA, 15 nt, synthetic construct
  source 1..15: mol_type = other RNA
  modified_base 1: mod_base = OTHER; note = 2'-O-methyl guanosine phosphorothioate
  modified_base 2: mod_base = OTHER; note = 2'-O-methyl cytosine phosphorothioate
  modified_base 3: mod_base = OTHER; note = 2'-fluoro adenosine
  modified_base 4: mod_base = OTHER; note = 2'-O-methyl guanosine
  modified_base 5: mod_base = OTHER; note = 2'-fluoro guanosine
  modified_base 6: mod_base = OTHER; note = 2'-O-methyl adenosine
  modified_base 7: mod_base = OTHER; note = 2'-fluoro cytosine
  modified_base 8: mod_base = OTHER; note = 2'-O-methyl adenosine
  modified_base 9: mod_base = OTHER; note = 2'-fluoro uridine
  modified_base 10: mod_base = OTHER; note = 2'-O-methyl uridine
  modified_base 11: mod_base = OTHER; note = 2'-O-methyl guanosine
  modified_base 12: mod_base = OTHER; note = 2'-O-methyl guanosine
  modified_base 13: mod_base = OTHER; note = 2'-fluoro guanosine phosphorothioate
  modified_base 14: mod_base = OTHER; note = 2'-O-methyl adenosine phosphorothioate
  modified_base 15: mod_base = OTHER; note = 2'-O-methyl adenosine triethylene glycol
gcaggacattgggaa

SEQ ID NO: 450 - RNA, 15 nt, synthetic construct
  source 1..15: mol_type = other RNA
  modified_base 1: mod_base = OTHER; note = 2'-O-methyl uridine phosphorothioate
  modified_base 2: mod_base = OTHER; note = 2'-O-methyl uridine phosphorothioate
  modified_base 3: mod_base = OTHER; note = 2'-fluoro cytosine
  modified_base 4: mod_base = OTHER; note = 2'-O-methyl adenosine
  modified_base 5: mod_base = OTHER; note = 2'-fluoro adenosine
  modified_base 6: mod_base = OTHER; note = 2'-O-methyl guanosine
  modified_base 7: mod_base = OTHER; note = 2'-fluoro adenosine
  modified_base 8: mod_base = OTHER; note = 2'-O-methyl adenosine
  modified_base 9: mod_base = OTHER; note = 2'-fluoro adenosine
  modified_base 10: mod_base = OTHER; note = 2'-O-methyl adenosine
  modified_base 11: mod_base = OTHER; note = 2'-O-methyl cytosine
  modified_base 12: mod_base = OTHER; note = 2'-O-methyl adenosine
  modified_base 13: mod_base = OTHER; note = 2'-fluoro adenosine phosphorothioate
  modified_base 14: mod_base = OTHER; note = 2'-O-methyl adenosine phosphorothioate
  modified_base 15: mod_base = OTHER; note = 2'-O-methyl adenosine triethylene glycol
ttcaagaaaacaaaa

SEQ ID NO: 451 - RNA, 15 nt, synthetic construct
  source 1..15: mol_type = other RNA
  modified_base 1: mod_base = OTHER; note = 2'-O-methyl guanosine phosphorothioate
  modified_base 2: mod_base = OTHER; note = 2'-O-methyl adenosine phosphorothioate
  modified_base 3: mod_base = OTHER; note = 2'-fluoro cytosine
  modified_base 4: mod_base = OTHER; note = 2'-O-methyl adenosine
  modified_base 5: mod_base = OTHER; note = 2'-fluoro adenosine
  modified_base 6: mod_base = OTHER; note = 2'-O-methyl uridine
  modified_base 7: mod_base = OTHER; note = 2'-fluoro guanosine
  modified_base 8: mod_base = OTHER; note = 2'-O-methyl adenosine
  modified_base 9: mod_base = OTHER; note = 2'-fluoro guanosine
  modified_base 10: mod_base = OTHER; note = 2'-O-methyl adenosine
  modified_base 11: mod_base = OTHER; note = 2'-O-methyl uridine
  modified_base 12: mod_base = OTHER; note = 2'-O-methyl uridine
  modified_base 13: mod_base = OTHER; note = 2'-fluoro adenosine phosphorothioate
  modified_base 14: mod_base = OTHER; note = 2'-O-methyl adenosine phosphorothioate
  modified_base 15: mod_base = OTHER; note = 2'-O-methyl adenosine triethylene glycol
gacaatgagattaaa

SEQ ID NO: 452 - RNA, 15 nt, synthetic construct
  source 1..15: mol_type = other RNA
  modified_base 1: mod_base = OTHER; note = 2'-O-methyl cytosine phosphorothioate
  modified_base 2: mod_base = OTHER; note = 2'-O-methyl uridine phosphorothioate
  modified_base 3: mod_base = OTHER; note = 2'-fluoro cytosine
  modified_base 4: mod_base = OTHER; note = 2'-O-methyl uridine
  modified_base 5: mod_base = OTHER; note = 2'-fluoro guanosine
  modified_base 6: mod_base = OTHER; note = 2'-O-methyl guanosine
  modified_base 7: mod_base = OTHER; note = 2'-fluoro cytosine
  modified_base 8: mod_base = OTHER; note = 2'-O-methyl guanosine
  modified_base 9: mod_base = OTHER; note = 2'-fluoro guanosine
  modified_base 10: mod_base = OTHER; note = 2'-O-methyl adenosine
  modified_base 11: mod_base = OTHER; note = 2'-O-methyl cytosine
  modified_base 12: mod_base = OTHER; note = 2'-O-methyl uridine
  modified_base 13: mod_base = OTHER; note = 2'-fluoro guanosine phosphorothioate
  modified_base 14: mod_base = OTHER; note = 2'-O-methyl cytosine phosphorothioate
  modified_base 15: mod_base = OTHER; note = 2'-O-methyl adenosine triethylene glycol
ctctggcggactgca

SEQ ID NO: 453 - RNA, 15 nt, synthetic construct
  source 1..15: mol_type = other RNA
  modified_base 1: mod_base = OTHER; note = 2'-O-methyl guanosine phosphorothioate
  modified_base 2: mod_base = OTHER; note = 2'-O-methyl cytosine phosphorothioate
  modified_base 3: mod_base = OTHER; note = 2'-fluoro adenosine
  modified_base 4: mod_base = OTHER; note = 2'-O-methyl cytosine
  modified_base 5: mod_base = OTHER; note = 2'-fluoro guanosine
  modified_base 6: mod_base = OTHER; note = 2'-O-methyl adenosine
  modified_base 7: mod_base = OTHER; note = 2'-fluoro cytosine
  modified_base 8: mod_base = OTHER; note = 2'-O-methyl guanosine
  modified_base 9: mod_base = OTHER; note = 2'-fluoro uridine
  modified_base 10: mod_base = OTHER; note = 2'-O-methyl cytosine
  modified_base 11: mod_base = OTHER; note = 2'-O-methyl cytosine
  modified_base 12: mod_base = OTHER; note = 2'-O-methyl uridine
  modified_base 13: mod_base = OTHER; note = 2'-fluoro guanosine phosphorothioate
  modified_base 14: mod_base = OTHER; note = 2'-O-methyl adenosine phosphorothioate
  modified_base 15: mod_base = OTHER; note = 2'-O-methyl adenosine triethylene glycol
gcacgacgtcctgaa

SEQ ID NO: 454 - RNA, 15 nt, synthetic construct
  source 1..15: mol_type = other RNA
  modified_base 1: mod_base = OTHER; note = 2'-O-methyl guanosine phosphorothioate
  modified_base 2: mod_base = OTHER; note = 2'-O-methyl cytosine phosphorothioate
  modified_base 3: mod_base = OTHER; note = 2'-fluoro uridine
  modified_base 4: mod_base = OTHER; note = 2'-O-methyl uridine
  modified_base 5: mod_base = OTHER; note = 2'-fluoro uridine
  modified_base 6: mod_base = OTHER; note = 2'-O-methyl uridine
  modified_base 7: mod_base = OTHER; note = 2'-fluoro guanosine
  modified_base 8: mod_base = OTHER; note = 2'-O-methyl guanosine
  modified_base 9: mod_base = OTHER; note = 2'-fluoro cytosine
  modified_base 10: mod_base = OTHER; note = 2'-O-methyl cytosine
  modified_base 11: mod_base = OTHER; note = 2'-O-methyl guanosine
  modified_base 12: mod_base = OTHER; note = 2'-O-methyl cytosine
  modified_base 13: mod_base = OTHER; note = 2'-fluoro adenosine phosphorothioate
  modified_base 14: mod_base = OTHER; note = 2'-O-methyl adenosine phosphorothioate
  modified_base 15: mod_base = OTHER; note = 2'-O-methyl adenosine triethylene glycol
gcttttggccgcaaa

SEQ ID NO: 455 - RNA, 15 nt, synthetic construct
  source 1..15: mol_type = other RNA
  modified_base 1: mod_base = OTHER; note = 2'-O-methyl uridine phosphorothioate
  modified_base 2: mod_base = OTHER; note = 2'-O-methyl guanosine phosphorothioate
  modified_base 3: mod_base = OTHER; note = 2'-fluoro cytosine
  modified_base 4: mod_base = OTHER; note = 2'-O-methyl uridine
  modified_base 5: mod_base = OTHER; note = 2'-fluoro guanosine
  modified_base 6: mod_base = OTHER; note = 2'-O-methyl adenosine
  modified_base 7: mod_base = OTHER; note = 2'-fluoro adenosine
  modified_base 8: mod_base = OTHER; note = 2'-O-methyl guanosine
  modified_base 9: mod_base = OTHER; note = 2'-fluoro cytosine
  modified_base 10: mod_base = OTHER; note = 2'-O-methyl adenosine
  modified_base 11: mod_base = OTHER; note = 2'-O-methyl guanosine
  modified_base 12: mod_base = OTHER; note = 2'-O-methyl uridine
  modified_base 13: mod_base = OTHER; note = 2'-fluoro uridine phosphorothioate
  modified_base 14: mod_base = OTHER; note = 2'-O-methyl uridine phosphorothioate
  modified_base 15: mod_base = OTHER; note = 2'-O-methyl adenosine triethylene glycol
tgctgaagcagttta

SEQ ID NO: 456 - RNA, 15 nt, synthetic construct
  source 1..15: mol_type = other RNA
  modified_base 1: mod_base = OTHER; note = 2'-O-methyl cytosine phosphorothioate
  modified_base 2: mod_base = OTHER; note = 2'-O-methyl adenosine phosphorothioate
  modified_base 3: mod_base = OTHER; note = 2'-fluoro guanosine
  modified_base 4: mod_base = OTHER; note = 2'-O-methyl uridine
  modified_base 5: mod_base = OTHER; note = 2'-fluoro guanosine
  modified_base 6: mod_base = OTHER; note = 2'-O-methyl adenosine
  modified_base 7: mod_base = OTHER; note = 2'-fluoro uridine
  modified_base 8: mod_base = OTHER; note = 2'-O-methyl guanosine
  modified_base 9: mod_base = OTHER; note = 2'-fluoro adenosine
  modified_base 10: mod_base = OTHER; note = 2'-O-methyl cytosine
  modified_base 11: mod_base = OTHER; note = 2'-O-methyl guanosine
  modified_base 12: mod_base = OTHER; note = 2'-O-methyl cytosine
  modified_base 13: mod_base = OTHER; note = 2'-fluoro adenosine phosphorothioate
  modified_base 14: mod_base = OTHER; note = 2'-O-methyl guanosine phosphorothioate
  modified_base 15: mod_base = OTHER; note = 2'-O-methyl adenosine triethylene glycol
cagtgatgacgcaga

SEQ ID NO: 457 - RNA, 15 nt, synthetic construct
  source 1..15: mol_type = other RNA
  modified_base 1: mod_base = OTHER; note = 2'-O-methyl cytosine phosphorothioate
  modified_base 2: mod_base = OTHER; note = 2'-O-methyl adenosine phosphorothioate
  modified_base 3: mod_base = OTHER; note = 2'-fluoro uridine
  modified_base 4: mod_base = OTHER; note = 2'-O-methyl cytosine
  modified_base 5: mod_base = OTHER; note = 2'-fluoro uridine
  modified_base 6: mod_base = OTHER; note = 2'-O-methyl adenosine
  modified_base 7: mod_base = OTHER; note = 2'-fluoro cytosine
  modified_base 8: mod_base = OTHER; note = 2'-O-methyl cytosine
  modified_base 9: mod_base = OTHER; note = 2'-fluoro guanosine
  modified_base 10: mod_base = OTHER; note = 2'-O-methyl cytosine
  modified_base 11: mod_base = OTHER; note = 2'-O-methyl adenosine
  modified_base 12: mod_base = OTHER; note = 2'-O-methyl uridine
  modified_base 13: mod_base = OTHER; note = 2'-fluoro cytosine phosphorothioate
  modified_base 14: mod_base = OTHER; note = 2'-O-methyl adenosine phosphorothioate
  modified_base 15: mod_base = OTHER; note = 2'-O-methyl adenosine triethylene glycol
catctaccgcatcaa

SEQ ID NO: 458 - RNA, 15 nt, synthetic construct
  source 1..15: mol_type = other RNA
  modified_base 1: mod_base = OTHER; note = 2'-O-methyl guanosine phosphorothioate
  modified_base 2: mod_base = OTHER; note = 2'-O-methyl cytosine phosphorothioate
  modified_base 3: mod_base = OTHER; note = 2'-fluoro adenosine
  modified_base 4: mod_base = OTHER; note = 2'-O-methyl uridine
  modified_base 5: mod_base = OTHER; note = 2'-fluoro guanosine
  modified_base 6: mod_base = OTHER; note = 2'-O-methyl uridine
  modified_base 7: mod_base = OTHER; note = 2'-fluoro adenosine
  modified_base 8: mod_base = OTHER; note = 2'-O-methyl cytosine
  modified_base 9: mod_base = OTHER; note = 2'-fluoro adenosine
  modified_base 10: mod_base = OTHER; note = 2'-O-methyl cytosine
  modified_base 11: mod_base = OTHER; note = 2'-O-methyl adenosine
  modified_base 12: mod_base = OTHER; note = 2'-O-methyl guanosine
  modified_base 13: mod_base = OTHER; note = 2'-fluoro guanosine phosphorothioate
  modified_base 14: mod_base = OTHER; note = 2'-O-methyl adenosine phosphorothioate
  modified_base 15: mod_base = OTHER; note = 2'-O-methyl adenosine triethylene glycol
gcatgtacacaggaa

SEQ ID NO: 459 - RNA, 15 nt, synthetic construct
  source 1..15: mol_type = other RNA
  modified_base 1: mod_base = OTHER; note = 2'-O-methyl cytosine phosphorothioate
  modified_base 2: mod_base = OTHER; note = 2'-O-methyl adenosine phosphorothioate
  modified_base 3: mod_base = OTHER; note = 2'-fluoro guanosine
  modified_base 4: mod_base = OTHER; note = 2'-O-methyl cytosine
  modified_base 5: mod_base = OTHER; note = 2'-fluoro guanosine
  modified_base 6: mod_base = OTHER; note = 2'-O-methyl adenosine
  modified_base 7: mod_base = OTHER; note = 2'-fluoro uridine
  modified_base 8: mod_base = OTHER; note = 2'-O-methyl cytosine
  modified_base 9: mod_base = OTHER; note = 2'-fluoro cytosine
  modified_base 10: mod_base = OTHER; note = 2'-O-methyl cytosine
  modified_base 11: mod_base = OTHER; note = 2'-O-methyl uridine
  modified_base 12: mod_base = OTHER; note = 2'-O-methyl adenosine
  modified_base 13: mod_base = OTHER; note = 2'-fluoro adenosine phosphorothioate
  modified_base 14: mod_base = OTHER; note = 2'-O-methyl adenosine phosphorothioate
  modified_base 15: mod_base = OTHER; note = 2'-O-methyl adenosine triethylene glycol
cagcgatccctaaaa

SEQ ID NO: 460 - RNA, 15 nt, synthetic construct
  source 1..15: mol_type = other RNA
  modified_base 1: mod_base = OTHER; note = 2'-O-methyl uridine phosphorothioate
  modified_base 2: mod_base = OTHER; note = 2'-O-methyl cytosine phosphorothioate
  modified_base 3: mod_base = OTHER; note = 2'-fluoro uridine
  modified_base 4: mod_base = OTHER; note = 2'-O-methyl guanosine
  modified_base 5: mod_base = OTHER; note = 2'-fluoro guanosine
  modified_base 6: mod_base = OTHER; note = 2'-O-methyl guanosine
  modified_base 7: mod_base = OTHER; note = 2'-fluoro cytosine
  modified_base 8: mod_base = OTHER; note = 2'-O-methyl adenosine
  modified_base 9: mod_base = OTHER; note = 2'-fluoro uridine
  modified_base 10: mod_base = OTHER; note = 2'-O-methyl cytosine
  modified_base 11: mod_base = OTHER; note = 2'-O-methyl guanosine
  modified_base 12: mod_base = OTHER; note = 2'-O-methyl cytosine
  modified_base 13: mod_base = OTHER; note = 2'-fluoro uridine phosphorothioate
  modified_base 14: mod_base = OTHER; note = 2'-O-methyl adenosine phosphorothioate
  modified_base 15: mod_base = OTHER; note = 2'-O-methyl adenosine triethylene glycol
tctgggcatcgctaa

SEQ ID NO: 461 - RNA, 15 nt, synthetic construct
  source 1..15: mol_type = other RNA
  modified_base 1: mod_base = OTHER; note = 2'-O-methyl guanosine phosphorothioate
  modified_base 2: mod_base = OTHER; note = 2'-O-methyl uridine phosphorothioate
  modified_base 3: mod_base = OTHER; note = 2'-fluoro guanosine
  modified_base 4: mod_base = OTHER; note = 2'-O-methyl cytosine
  modified_base 5: mod_base = OTHER; note = 2'-fluoro guanosine
  modified_base 6: mod_base = OTHER; note = 2'-O-methyl adenosine
  modified_base 7: mod_base = OTHER; note = 2'-fluoro cytosine
  modified_base 8: mod_base = OTHER; note = 2'-O-methyl cytosine
  modified_base 9: mod_base = OTHER; note = 2'-fluoro guanosine
  modified_base 10: mod_base = OTHER; note = 2'-O-methyl adenosine
  modified_base 11: mod_base = OTHER; note = 2'-O-methyl guanosine
  modified_base 12: mod_base = OTHER; note = 2'-O-methyl guanosine
  modified_base 13: mod_base = OTHER; note = 2'-fluoro adenosine phosphorothioate
  modified_base 14: mod_base = OTHER; note = 2'-O-methyl cytosine phosphorothioate
  modified_base 15: mod_base = OTHER; note = 2'-O-methyl adenosine triethylene glycol
gtgcgaccgaggaca

SEQ ID NO: 462 - RNA, 15 nt, synthetic construct
  source 1..15: mol_type = other RNA
  modified_base 1: mod_base = OTHER; note = 2'-O-methyl cytosine phosphorothioate
  modified_base 2: mod_base = OTHER; note = 2'-O-methyl adenosine phosphorothioate
  modified_base 3: mod_base = OTHER; note = 2'-fluoro cytosine
  modified_base 4: mod_base = OTHER; note = 2'-O-methyl uridine
  modified_base 5: mod_base = OTHER; note = 2'-fluoro guanosine
  modified_base 6: mod_base = OTHER; note = 2'-O-methyl adenosine
  modified_base 7: mod_base = OTHER; note = 2'-fluoro adenosine
  modified_base 8: mod_base = OTHER; note = 2'-O-methyl guanosine
  modified_base 9: mod_base = OTHER; note = 2'-fluoro cytosine
  modified_base 10: mod_base = OTHER; note = 2'-O-methyl adenosine
  modified_base 11: mod_base = OTHER; note = 2'-O-methyl guanosine
  modified_base 12: mod_base = OTHER; note = 2'-O-methyl uridine
  modified_base 13: mod_base = OTHER; note = 2'-fluoro adenosine phosphorothioate
  modified_base 14: mod_base = OTHER; note = 2'-O-methyl cytosine phosphorothioate
  modified_base 15: mod_base = OTHER; note = 2'-O-methyl adenosine triethylene glycol
cactgaagcagtaca

SEQ ID NO: 463 - RNA, 15 nt, synthetic construct
  source 1..15: mol_type = other RNA
  modified_base 1: mod_base = OTHER; note = 2'-O-methyl adenosine phosphorothioate
  modified_base 2: mod_base = OTHER; note = 2'-O-methyl guanosine phosphorothioate
  modified_base 3: mod_base = OTHER; note = 2'-fluoro uridine
  modified_base 4: mod_base = OTHER; note = 2'-O-methyl uridine
  modified_base 5: mod_base = OTHER; note = 2'-fluoro cytosine
  modified_base 6: mod_base = OTHER; note = 2'-O-methyl adenosine
  modified_base 7: mod_base = OTHER; note = 2'-fluoro uridine
  modified_base 8: mod_base = OTHER; note = 2'-O-methyl cytosine
  modified_base 9: mod_base = OTHER; note = 2'-fluoro uridine
  modified_base 10: mod_base = OTHER; note = 2'-O-methyl adenosine
  modified_base 11: mod_base = OTHER; note = 2'-O-methyl cytosine
  modified_base 12: mod_base = OTHER; note = 2'-O-methyl cytosine
  modified_base 13: mod_base = OTHER; note = 2'-fluoro guanosine phosphorothioate
  modified_base 14: mod_base = OTHER; note = 2'-O-methyl cytosine phosphorothioate
  modified_base 15: mod_base = OTHER; note = 2'-O-methyl adenosine triethylene glycol
agttcatctaccgca

SEQ ID NO: 464 - RNA, 15 nt, synthetic construct
  source 1..15: mol_type = other RNA
  modified_base 1: mod_base = OTHER; note = 2'-O-methyl uridine phosphorothioate
  modified_base 2: mod_base = OTHER; note = 2'-O-methyl cytosine phosphorothioate
  modified_base 3: mod_base = OTHER; note = 2'-fluoro uridine
  modified_base 4: mod_base = OTHER; note = 2'-O-methyl guanosine
  modified_base 5: mod_base = OTHER; note = 2'-fluoro cytosine
  modified_base 6: mod_base = OTHER; note = 2'-O-methyl uridine
  modified_base 7: mod_base = OTHER; note = 2'-fluoro cytosine
  modified_base 8: mod_base = OTHER; note = 2'-O-methyl cytosine
  modified_base 9: mod_base = OTHER; note = 2'-fluoro adenosine
  modified_base 10: mod_base = OTHER; note = 2'-O-methyl adenosine
  modified_base 11: mod_base = OTHER; note = 2'-O-methyl cytosine
  modified_base 12: mod_base = OTHER; note = 2'-O-methyl uridine
  modified_base 13: mod_base = OTHER; note = 2'-fluoro guanosine phosphorothioate
  modified_base 14: mod_base = OTHER; note = 2'-O-methyl guanosine phosphorothioate
  modified_base 15: mod_base = OTHER; note = 2'-O-methyl adenosine triethylene glycol
tctgctccaactgga

SEQ ID NO: 465 - RNA, 15 nt, synthetic construct
  source 1..15: mol_type = other RNA
  modified_base 1: mod_base = OTHER; note = 2'-O-methyl cytosine phosphorothioate
  modified_base 2: mod_base = OTHER; note = 2'-O-methyl cytosine phosphorothioate
  modified_base 3: mod_base = OTHER; note = 2'-fluoro adenosine
  modified_base 4: mod_base = OTHER; note = 2'-O-methyl uridine
  modified_base 5: mod_base = OTHER; note = 2'-fluoro cytosine
  modified_base 6: mod_base = OTHER; note = 2'-O-methyl uridine
  modified_base 7: mod_base = OTHER; note = 2'-fluoro guanosine
  modified_base 8: mod_base = OTHER; note = 2'-O-methyl cytosine
  modified_base 9: mod_base = OTHER; note = 2'-fluoro uridine
  modified_base 10: mod_base = OTHER; note = 2'-O-methyl uridine
  modified_base 11: mod_base = OTHER; note = 2'-O-methyl guanosine
  modified_base 12: mod_base = OTHER; note = 2'-O-methyl guanosine
  modified_base 13: mod_base = OTHER; note = 2'-fluoro adenosine phosphorothioate
  modified_base 14: mod_base = OTHER; note = 2'-O-methyl guanosine phosphorothioate
  modified_base 15: mod_base = OTHER; note = 2'-O-methyl adenosine triethylene glycol
ccatctgcttggaga

SEQ ID NO: 466 - RNA, 15 nt, synthetic construct
  source 1..15: mol_type = other RNA
  modified_base 1: mod_base = OTHER; note = 2'-O-methyl guanosine phosphorothioate
  modified_base 2: mod_base = OTHER; note = 2'-O-methyl adenosine phosphorothioate
  modified_base 3: mod_base = OTHER; note = 2'-fluoro guanosine
  modified_base 4: mod_base = OTHER; note = 2'-O-methyl guanosine
  modified_base 5: mod_base = OTHER; note = 2'-fluoro cytosine
  modified_base 6: mod_base = OTHER; note = 2'-O-methyl uridine
  modified_base 7: mod_base = OTHER; note = 2'-fluoro cytosine
  modified_base 8: mod_base = OTHER; note = 2'-O-methyl guanosine
  modified_base 9: mod_base = OTHER; note = 2'-fluoro uridine
  modified_base 10: mod_base = OTHER; note = 2'-O-methyl cytosine
  modified_base 11: mod_base = OTHER; note = 2'-O-methyl cytosine
  modified_base 12: mod_base = OTHER; note = 2'-O-methyl cytosine
  modified_base 13: mod_base = OTHER; note = 2'-fluoro adenosine phosphorothioate
  modified_base 14: mod_base = OTHER; note = 2'-O-methyl adenosine phosphorothioate
  modified_base 15: mod_base = OTHER; note = 2'-O-methyl adenosine triethylene glycol
gaggctcgtcccaaa

SEQ ID NO: 467 - RNA, 15 nt, synthetic construct
  source 1..15: mol_type = other RNA
  modified_base 1: mod_base = OTHER; note = 2'-O-methyl guanosine phosphorothioate
  modified_base 2: mod_base = OTHER; note = 2'-O-methyl uridine phosphorothioate
  modified_base 3: mod_base = OTHER; note = 2'-fluoro uridine
  modified_base 4: mod_base = OTHER; note = 2'-O-methyl guanosine
  modified_base 5: mod_base = OTHER; note = 2'-fluoro cytosine
  modified_base 6: mod_base = OTHER; note = 2'-O-methyl adenosine
  modified_base 7: mod_base = OTHER; note = 2'-fluoro guanosine
  modified_base 8: mod_base = OTHER; note = 2'-O-methyl cytosine
  modified_base 9: mod_base = OTHER; note = 2'-fluoro uridine
  modified_base 10: mod_base = OTHER; note = 2'-O-methyl adenosine
  modified_base 11: mod_base = OTHER; note = 2'-O-methyl guanosine
  modified_base 12: mod_base = OTHER; note = 2'-O-methyl adenosine
  modified_base 13: mod_base = OTHER; note = 2'-fluoro adenosine phosphorothioate
  modified_base 14: mod_base = OTHER; note = 2'-O-methyl cytosine phosphorothioate
  modified_base 15: mod_base = OTHER; note = 2'-O-methyl adenosine triethylene glycol
gttgcagctagaaca

SEQ ID NO: 468 - RNA, 15 nt, synthetic construct
  source 1..15: mol_type = other RNA
  modified_base 1: mod_base = OTHER; note = 2'-O-methyl cytosine phosphorothioate
  modified_base 2: mod_base = OTHER; note = 2'-O-methyl adenosine phosphorothioate
  modified_base 3: mod_base = OTHER; note = 2'-fluoro guanosine
  modified_base 4: mod_base = OTHER; note = 2'-O-methyl cytosine
  modified_base 5: mod_base = OTHER; note = 2'-fluoro adenosine
  modified_base 6: mod_base = OTHER; note = 2'-O-methyl guanosine
  modified_base 7: mod_base = OTHER; note = 2'-fluoro uridine
  modified_base 8: mod_base = OTHER; note = 2'-O-methyl uridine
  modified_base 9: mod_base = OTHER; note = 2'-fluoro guanosine
  modified_base 10: mod_base = OTHER; note = 2'-O-methyl cytosine
  modified_base 11: mod_base = OTHER; note = 2'-O-methyl uridine
  modified_base 12: mod_base = OTHER; note = 2'-O-methyl guanosine
  modified_base 13: mod_base = OTHER; note = 2'-fluoro adenosine phosphorothioate
  modified_base 14: mod_base = OTHER; note = 2'-O-methyl adenosine phosphorothioate
  modified_base 15: mod_base = OTHER; note = 2'-O-methyl adenosine triethylene glycol
cagcagttgctgaaa

SEQ ID NO: 469 - RNA, 15 nt, synthetic construct
  source 1..15: mol_type = other RNA
  modified_base 1: mod_base = OTHER; note = 2'-O-methyl cytosine phosphorothioate
  modified_base 2: mod_base = OTHER; note = 2'-O-methyl adenosine phosphorothioate
  modified_base 3: mod_base = OTHER; note = 2'-fluoro cytosine
  modified_base 4: mod_base = OTHER; note = 2'-O-methyl adenosine
  modified_base 5: mod_base = OTHER; note = 2'-fluoro guanosine
  modified_base 6: mod_base = OTHER; note = 2'-O-methyl adenosine
  modified_base 7: mod_base = OTHER; note = 2'-fluoro guanosine
  modified_base 8: mod_base = OTHER; note = 2'-O-methyl adenosine
  modified_base 9: mod_base = OTHER; note = 2'-fluoro cytosine
  modified_base 10: mod_base = OTHER; note = 2'-O-methyl adenosine
  modified_base 11: mod_base = OTHER; note = 2'-O-methyl cytosine
  modified_base 12: mod_base = OTHER; note = 2'-O-methyl cytosine
  modified_base 13: mod_base = OTHER; note = 2'-fluoro adenosine phosphorothioate
  modified_base 14: mod_base = OTHER; note = 2'-O-methyl guanosine phosphorothioate
  modified_base 15: mod_base = OTHER; note = 2'-O-methyl adenosine triethylene glycol
cacagagacaccaga

SEQ ID NO: 470 - RNA, 15 nt, synthetic construct
  source 1..15: mol_type = other RNA
  modified_base 1: mod_base = OTHER; note = 2'-O-methyl uridine phosphorothioate
  modified_base 2: mod_base = OTHER; note = 2'-O-methyl cytosine phosphorothioate
  modified_base 3: mod_base = OTHER; note = 2'-fluoro adenosine
  modified_base 4: mod_base = OTHER; note = 2'-O-methyl guanosine
  modified_base 5: mod_base = OTHER; note = 2'-fluoro cytosine
  modified_base 6: mod_base = OTHER; note = 2'-O-methyl adenosine
  modified_base 7: mod_base = OTHER; note = 2'-fluoro adenosine
  modified_base 8: mod_base = OTHER; note = 2'-O-methyl adenosine
  modified_base 9: mod_base = OTHER; note = 2'-fluoro cytosine
  modified_base 10: mod_base = OTHER; note = 2'-O-methyl uridine
  modified_base 11: mod_base = OTHER; note = 2'-O-methyl cytosine
  modified_base 12: mod_base = OTHER; note = 2'-O-methyl uridine
  modified_base 13: mod_base = OTHER; note = 2'-fluoro adenosine phosphorothioate
  modified_base 14: mod_base = OTHER; note = 2'-O-methyl cytosine phosphorothioate
  modified_base 15: mod_base = OTHER; note = 2'-O-methyl adenosine triethylene glycol
tcagcaaactctaca

SEQ ID NO: 471 - RNA, 15 nt, synthetic construct
  source 1..15: mol_type = other RNA
  modified_base 1: mod_base = OTHER; note = 2'-O-methyl guanosine phosphorothioate
  modified_base 2: mod_base = OTHER; note = 2'-O-methyl uridine phosphorothioate
  modified_base 3: mod_base = OTHER; note = 2'-fluoro guanosine
  modified_base 4: mod_base = OTHER; note = 2'-O-methyl adenosine
  modified_base 5: mod_base = OTHER; note = 2'-fluoro guanosine
  modified_base 6: mod_base = OTHER; note = 2'-O-methyl uridine
  modified_base 7: mod_base = OTHER; note = 2'-fluoro cytosine
  modified_base 8: mod_base = OTHER; note = 2'-O-methyl cytosine
  modified_base 9: mod_base = OTHER; note = 2'-fluoro cytosine
  modified_base 10: mod_base = OTHER; note = 2'-O-methyl adenosine
  modified_base 11: mod_base = OTHER; note = 2'-O-methyl adenosine
  modified_base 12: mod_base = OTHER; note = 2'-O-methyl guanosine
  modified_base 13: mod_base = OTHER; note = 2'-fluoro adenosine phosphorothioate
  modified_base 14: mod_base = OTHER; note = 2'-O-methyl adenosine phosphorothioate
  modified_base 15: mod_base = OTHER; note = 2'-O-methyl adenosine triethylene glycol
gtgagtcccaagaaa

SEQ ID NO: 472 - RNA, 15 nt, synthetic construct
  source 1..15: mol_type = other RNA
  modified_base 1: mod_base = OTHER; note = 2'-O-methyl uridine phosphorothioate
  modified_base 2: mod_base = OTHER; note = 2'-O-methyl guanosine phosphorothioate
  modified_base 3: mod_base = OTHER; note = 2'-fluoro adenosine
  modified_base 4: mod_base = OTHER; note = 2'-O-methyl cytosine
  modified_base 5: mod_base = OTHER; note = 2'-fluoro adenosine
  modified_base 6: mod_base = OTHER; note = 2'-O-methyl adenosine
  modified_base 7: mod_base = OTHER; note = 2'-fluoro uridine
  modified_base 8: mod_base = OTHER; note = 2'-O-methyl cytosine
  modified_base 9: mod_base = OTHER; note = 2'-fluoro uridine
  modified_base 10: mod_base = OTHER; note = 2'-O-methyl guanosine
  modified_base 11: mod_base = OTHER; note = 2'-O-methyl uridine
  modified_base 12: mod_base = OTHER; note = 2'-O-methyl guanosine
  modified_base 13: mod_base = OTHER; note = 2'-fluoro adenosine phosphorothioate
  modified_base 14: mod_base = OTHER; note = 2'-O-methyl adenosine phosphorothioate
  modified_base 15: mod_base = OTHER; note = 2'-O-methyl adenosine triethylene glycol
tgacaatctgtgaaa

SEQ ID NO: 473 - RNA, 15 nt, synthetic construct
  source 1..15: mol_type = other RNA
  modified_base 1: mod_base = OTHER; note = 2'-O-methyl guanosine phosphorothioate
  modified_base 2: mod_base = OTHER; note = 2'-O-methyl guanosine phosphorothioate
  modified_base 3: mod_base = OTHER; note = 2'-fluoro cytosine
  modified_base 4: mod_base = OTHER; note = 2'-O-methyl cytosine
  modified_base 5: mod_base = OTHER; note = 2'-fluoro adenosine
  modified_base 6: mod_base = OTHER; note = 2'-O-methyl guanosine
  modified_base 7: mod_base = OTHER; note = 2'-fluoro uridine
  modified_base 8: mod_base = OTHER; note = 2'-O-methyl cytosine
  modified_base 9: mod_base = OTHER; note = 2'-fluoro cytosine
  modified_base 10: mod_base = OTHER; note = 2'-O-methyl adenosine
  modified_base 11: mod_base = OTHER; note = 2'-O-methyl cytosine
  modified_base 12: mod_base = OTHER; note = 2'-O-methyl uridine
  modified_base 13: mod_base = OTHER; note = 2'-fluoro guanosine phosphorothioate
  modified_base 14: mod_base = OTHER; note = 2'-O-methyl adenosine phosphorothioate
  modified_base 15: mod_base = OTHER; note = 2'-O-methyl adenosine triethylene glycol
ggccagtccactgaa

SEQ ID NO: 474 - RNA, 15 nt, synthetic construct
  source 1..15: mol_type = other RNA
  modified_base 1: mod_base = OTHER; note = 2'-O-methyl guanosine phosphorothioate
  modified_base 2: mod_base = OTHER; note = 2'-O-methyl adenosine phosphorothioate
  modified_base 3: mod_base = OTHER; note = 2'-fluoro uridine
  modified_base 4: mod_base = OTHER; note = 2'-O-methyl cytosine
  modified_base 5: mod_base = OTHER; note = 2'-fluoro cytosine
  modified_base 6: mod_base = OTHER; note = 2'-O-methyl uridine
  modified_base 7: mod_base = OTHER; note = 2'-fluoro guanosine
  modified_base 8: mod_base = OTHER; note = 2'-O-methyl guanosine
  modified_base 9: mod_base = OTHER; note = 2'-fluoro guanosine
  modified_base 10: mod_base = OTHER; note = 2'-O-methyl adenosine
  modified_base 11: mod_base = OTHER; note = 2'-O-methyl uridine
  modified_base 12: mod_base = OTHER; note = 2'-O-methyl adenosine
  modified_base 13: mod_base = OTHER; note = 2'-fluoro cytosine phosphorothioate
  modified_base 14: mod_base = OTHER; note = 2'-O-methyl cytosine phosphorothioate
  modified_base 15: mod_base = OTHER; note = 2'-O-methyl adenosine triethylene glycol
gatcctgggatacca

SEQ ID NO: 475 - RNA, 20 nt, synthetic construct
  source 1..20: mol_type = other RNA
ttaatctctttactgatata

SEQ ID NO: 476 - RNA, 15 nt, synthetic construct
  source 1..15: mol_type = other RNA
cagtaaagagattaa

SEQ ID NO: 477 - DNA, 45 bp, Homo sapiens
  source 1..45: mol_type = genomic DNA
ggagccgctgcaccgactgagtttgggcccgctgcagctccctgt

SEQ ID NO: 478 - DNA, 45 bp, Homo sapiens
  source 1..45: mol_type = genomic DNA
agccgctgcaccgactgagtttgggcccgctgcagctccctgtcc

SEQ ID NO: 479 - DNA, 45 bp, Homo sapiens
  source 1..45: mol_type = genomic DNA
gctgcaccgactgagtttgggcccgctgcagctccctgtcccggc

SEQ ID NO: 480 - DNA, 45 bp, Homo sapiens
  source 1..45: mol_type = genomic DNA
agctccctgtcccggcgggtcccaggctacggcggggatggcggt

SEQ ID NO: 481 - DNA, 45 bp, Homo sapiens
  source 1..45: mol_type = genomic DNA
ctccctgtcccggcgggtcccaggctacggcggggatggcggtaa

SEQ ID NO: 482 - DNA, 45 bp, Homo sapiens
  source 1..45: mol_type = genomic DNA
ctgtcccggcgggtcccaggctacggcggggatggcggtaaccct

SEQ ID NO: 483 - DNA, 45 bp, Homo sapiens
  source 1..45: mol_type = genomic DNA
cggcgggtcccaggctacggcggggatggcggtaaccctgcagcc

SEQ ID NO: 484 - DNA, 45 bp, Homo sapiens
  source 1..45: mol_type = genomic DNA
ggcgggtcccaggctacggcggggatggcggtaaccctgcagcct

SEQ ID NO: 485 - DNA, 45 bp, Homo sapiens
  source 1..45: mol_type = genomic DNA
gtcccaggctacggcggggatggcggtaaccctgcagcctgcggg

SEQ ID NO: 486 - DNA, 45 bp, Homo sapiens
  source 1..45: mol_type = genomic DNA
ccaggctacggcggggatggcggtaaccctgcagcctgcgggccg

SEQ ID NO: 487 - DNA, 45 bp, Homo sapiens
  source 1..45: mol_type = genomic DNA
ggctacggcggggatggcggtaaccctgcagcctgcgggccggcg

SEQ ID NO: 488 - DNA, 45 bp, Homo sapiens
  source 1..45: mol_type = genomic DNA
gctacggcggggatggcggtaaccctgcagcctgcgggccggcga

SEQ ID NO: 489 - DNA, 45 bp, Homo sapiens
  source 1..45: mol_type = genomic DNA
tacggcggggatggcggtaaccctgcagcctgcgggccggcgaca

SEQ ID NO: 490 - DNA, 45 bp, Homo sapiens
  source 1..45: mol_type = genomic DNA
taaccctgcagcctgcgggccggcgacacgaacccccggccccgc

SEQ ID NO: 491 - DNA, 45 bp, Homo sapiens
  source 1..45: mol_type = genomic DNA
acgaacccccggccccgcagagacagagtgacccagcaacccaga

SEQ ID NO: 492 - DNA, 45 bp, Homo sapiens
  source 1..45: mol_type = genomic DNA
cccccggccccgcagagacagagtgacccagcaacccagagccca

SEQ ID NO: 493 - DNA, 45 bp, Homo sapiens
  source 1..45: mol_type = genomic DNA
gacagagtgacccagcaacccagagcccatgagggacacccgccc

SEQ ID NO: 494 - DNA, 45 bp, Homo sapiens
  source 1..45: mol_type = genomic DNA
tgacccagcaacccagagcccatgagggacacccgccccctcctg

SEQ ID NO: 495 - DNA, 45 bp, Homo sapiens
  source 1..45: mol_type = genomic DNA
ggccttcccccacttcagccccgctccctcacttgggtcttccct

SEQ ID NO: 496 - DNA, 45 bp, Homo sapiens
  source 1..45: mol_type = genomic DNA
gccttcccccacttcagccccgctccctcacttgggtcttccctt

SEQ ID NO: 497 - DNA, 45 bp, Homo sapiens
  source 1..45: mol_type = genomic DNA
ccttcccccacttcagccccgctccctcacttgggtcttcccttg

SEQ ID NO: 498 - DNA, 45 bp, Homo sapiens
  source 1..45: mol_type = genomic DNA
cccccacttcagccccgctccctcacttgggtcttcccttgtcct

SEQ ID NO: 499 - DNA, 45 bp, Homo sapiens
  source 1..45: mol_type = genomic DNA
ccccacttcagccccgctccctcacttgggtcttcccttgtcctc

SEQ ID NO: 500 - DNA, 45 bp, Homo sapiens
  source 1..45: mol_type = genomic DNA
ccacttcagccccgctccctcacttgggtcttcccttgtcctctc

SEQ ID NO: 501 - DNA, 45 bp, Homo sapiens
  source 1..45: mol_type = genomic DNA
cagccccgctccctcacttgggtcttcccttgtcctctcgcgagg

SEQ ID NO: 502 - DNA, 45 bp, Homo sapiens
  source 1..45: mol_type = genomic DNA
ccccgctccctcacttgggtcttcccttgtcctctcgcgagggga

SEQ ID NO: 503 - DNA, 45 bp, Homo sapiens
  source 1..45: mol_type = genomic DNA
gctccctcacttgggtcttcccttgtcctctcgcgaggggaggca

SEQ ID NO: 504 - DNA, 45 bp, Homo sapiens
  source 1..45: mol_type = genomic DNA
tccctcacttgggtcttcccttgtcctctcgcgaggggaggcaga

SEQ ID NO: 505 - DNA, 45 bp, Homo sapiens
  source 1..45: mol_type = genomic DNA
ccctcacttgggtcttcccttgtcctctcgcgaggggaggcagag

SEQ ID NO: 506 - DNA, 45 bp, Homo sapiens
  source 1..45: mol_type = genomic DNA
cccttgtcctctcgcgaggggaggcagagccttgttggggcctgt

SEQ ID NO: 507 - DNA, 45 bp, Homo sapiens
  source 1..45: mol_type = genomic DNA
ccttgtcctctcgcgaggggaggcagagccttgttggggcctgtc

SEQ ID NO: 508 - DNA, 45 bp, Homo sapiens
  source 1..45: mol_type = genomic DNA
ttgtcctctcgcgaggggaggcagagccttgttggggcctgtcct

SEQ ID NO: 509 - DNA, 45 bp, Homo sapiens
  source 1..45: mol_type = genomic DNA
tgtcctctcgcgaggggaggcagagccttgttggggcctgtcctg

SEQ ID NO: 510 - DNA, 45 bp, Homo sapiens
  source 1..45: mol_type = genomic DNA
gtcctctcgcgaggggaggcagagccttgttggggcctgtcctga

SEQ ID NO: 511 - DNA, 45 bp, Homo sapiens
  source 1..45: mol_type = genomic DNA
tcctctcgcgaggggaggcagagccttgttggggcctgtcctgaa

SEQ ID NO: 512 - DNA, 45 bp, Homo sapiens
  source 1..45: mol_type = genomic DNA
ctcgcgaggggaggcagagccttgttggggcctgtcctgaattca

SEQ ID NO: 513 - DNA, 45 bp, Homo sapiens
  source 1..45: mol_type = genomic DNA
tcgcgaggggaggcagagccttgttggggcctgtcctgaattcac

SEQ ID NO: 514 - DNA, 45 bp, Homo sapiens
  source 1..45: mol_type = genomic DNA
cgcgaggggaggcagagccttgttggggcctgtcctgaattcacc

SEQ ID NO: 515 - DNA, 45 bp, Homo sapiens
  source 1..45: mol_type = genomic DNA
cgaggggaggcagagccttgttggggcctgtcctgaattcaccga

SEQ ID NO: 516 - DNA, 45 bp, Homo sapiens
  source 1..45: mol_type = genomic DNA
gaggcagagccttgttggggcctgtcctgaattcaccgaggggag

SEQ ID NO: 517 - DNA, 45 bp, Homo sapiens
  source 1..45: mol_type = genomic DNA
ggcggtaaccctgcagcctgcgggccggcgacacgaacccccggc

SEQ ID NO: 518 - DNA, 45 bp, Homo sapiens
  source 1..45: mol_type = genomic DNA
gcggtaaccctgcagcctgcgggccggcgacacgaacccccggcc

SEQ ID NO: 519 - DNA, 45 bp, Homo sapiens
  source 1..45: mol_type = genomic DNA
cggtaaccctgcagcctgcgggccggcgacacgaacccccggccc

SEQ ID NO: 520 - DNA, 45 bp, Homo sapiens
  source 1..45: mol_type = genomic DNA
ggtaaccctgcagcctgcgggccggcgacacgaacccccggcccc

SEQ ID NO: 521 - DNA, 45 bp, Homo sapiens
  source 1..45: mol_type = genomic DNA
gtaaccctgcagcctgcgggccggcgacacgaacccccggccccg

SEQ ID NO: 522 - DNA, 45 bp, Homo sapiens
  source 1..45: mol_type = genomic DNA
aaccctgcagcctgcgggccggcgacacgaacccccggccccgca

SEQ ID NO: 523 - DNA, 45 bp, Homo sapiens
  source 1..45: mol_type = genomic DNA
accctgcagcctgcgggccggcgacacgaacccccggccccgcag

SEQ ID NO: 524 - DNA, 45 bp, Homo sapiens
  source 1..45: mol_type = genomic DNA
cgggccggcgacacgaacccccggccccgcagagacagagtgacc

SEQ ID NO: 525 - DNA, 45 bp, Homo sapiens
  source 1..45: mol_type = genomic DNA
gggccggcgacacgaacccccggccccgcagagacagagtgaccc

SEQ ID NO: 526 - DNA, 45 bp, Homo sapiens
  source 1..45: mol_type = genomic DNA
ggccggcgacacgaacccccggccccgcagagacagagtgaccca

SEQ ID NO: 527 - DNA, 45 bp, Homo sapiens
  source 1..45: mol_type = genomic DNA
cggcgacacgaacccccggccccgcagagacagagtgacccagca

SEQ ID NO: 528 - DNA, 45 bp, Homo sapiens
  source 1..45: mol_type = genomic DNA
gcgacacgaacccccggccccgcagagacagagtgacccagcaac

SEQ ID NO: 529 - DNA, 45 bp, Homo sapiens
  source 1..45: mol_type = genomic DNA
cgaacccccggccccgcagagacagagtgacccagcaacccagag

SEQ ID NO: 530 - DNA, 45 bp, Homo sapiens
  source 1..45: mol_type = genomic DNA
gaacccccggccccgcagagacagagtgacccagcaacccagagc

SEQ ID NO: 531 - DNA, 45 bp, Homo sapiens
  source 1..45: mol_type = genomic DNA
aacccccggccccgcagagacagagtgacccagcaacccagagcc

SEQ ID NO: 532 - DNA, 45 bp, Homo sapiens
  source 1..45: mol_type = genomic DNA
ccccggccccgcagagacagagtgacccagcaacccagagcccat

SEQ ID NO: 533 - DNA, 45 bp, Homo sapiens
  source 1..45: mol_type = genomic DNA
cccggccccgcagagacagagtgacccagcaacccagagcccatg

SEQ ID NO: 534 - DNA, 45 bp, Homo sapiens
  source 1..45: mol_type = genomic DNA
ccggccccgcagagacagagtgacccagcaacccagagcccatga

SEQ ID NO: 535 - DNA, 45 bp, Homo sapiens
  source 1..45: mol_type = genomic DNA
gccccgcagagacagagtgacccagcaacccagagcccatgaggg

SEQ ID NO: 536 - DNA, 45 bp, Homo sapiens
  source 1..45: mol_type = genomic DNA
gagacagagtgacccagcaacccagagcccatgagggacacccgc

SEQ ID NO: 537 - DNA, 45 bp, Homo sapiens
  source 1..45: mol_type = genomic DNA
agacagagtgacccagcaacccagagcccatgagggacacccgcc

SEQ ID NO: 538 - DNA, 45 bp, Homo sapiens
  source 1..45: mol_type = genomic DNA
acagagtgacccagcaacccagagcccatgagggacacccgcccc

SEQ ID NO: 539 - DNA, 45 bp, Homo sapiens
  source 1..45: mol_type = genomic DNA
cagagtgacccagcaacccagagcccatgagggacacccgccccc

SEQ ID NO: 540 - DNA, 45 bp, Homo sapiens
  source 1..45: mol_type = genomic DNA
agagtgacccagcaacccagagcccatgagggacacccgccccct

SEQ ID NO: 541 - DNA, 45 bp, Homo sapiens
  source 1..45: mol_type = genomic DNA
ttacctctcagtattctatttccgatctggatgtgtcccagatgg

SEQ ID NO: 542 - DNA, 45 bp, Homo sapiens
  source 1..45: mol_type = genomic DNA
tacctctcagtattctatttccgatctggatgtgtcccagatggc

SEQ ID NO: 543 - DNA, 45 bp, Homo sapiens
  source 1..45: mol_type = genomic DNA
acctctcagtattctatttccgatctggatgtgtcccagatggca

SEQ ID NO: 544 - DNA, 45 bp, Homo sapiens
  source 1..45: mol_type = genomic DNA
cctctcagtattctatttccgatctggatgtgtcccagatggcat

SEQ ID NO: 545 - DNA, 45 bp, Homo sapiens
  source 1..45: mol_type = genomic DNA
tctcagtattctatttccgatctggatgtgtcccagatggcattt

SEQ ID NO: 546 - DNA, 45 bp, Homo sapiens
  source 1..45: mol_type = genomic DNA
ctcagtattctatttccgatctggatgtgtcccagatggcatttg

SEQ ID NO: 547 - DNA, 45 bp, Homo sapiens
  source 1..45: mol_type = genomic DNA
tcagtattctatttccgatctggatgtgtcccagatggcatttgg

SEQ ID NO: 548 - DNA, 45 bp, Homo sapiens
  source 1..45: mol_type = genomic DNA
cagtattctatttccgatctggatgtgtcccagatggcatttggt

SEQ ID NO: 549 - DNA, 45 bp, Homo sapiens
  source 1..45: mol_type = genomic DNA
tattctatttccgatctggatgtgtcccagatggcatttggtaag

SEQ ID NO: 550 - DNA, 45 bp, Homo sapiens
  source 1..45: mol_type = genomic DNA
attctatttccgatctggatgtgtcccagatggcatttggtaaga

SEQ ID NO: 551 - DNA, 45 bp, Homo sapiens
  source 1..45: mol_type = genomic DNA
ttctatttccgatctggatgtgtcccagatggcatttggtaagaa

SEQ ID NO: 552 - DNA, 45 bp, Homo sapiens
  source 1..45: mol_type = genomic DNA
tctatttccgatctggatgtgtcccagatggcatttggtaagaat

SEQ ID NO: 553 - DNA, 45 bp, Homo sapiens
  source 1..45: mol_type = genomic DNA
ctatttccgatctggatgtgtcccagatggcatttggtaagaata

SEQ ID NO: 554 - RNA, 20 nt, Homo sapiens
  source 1..20: mol_type = genomic RNA
actgagtttgggcccgctgc

SEQ ID NO: 555 - RNA, 20 nt, Homo sapiens
  source 1..20: mol_type = genomic RNA
tgagtttgggcccgctgcag

SEQ ID NO: 556 - RNA, 20 nt, Homo sapiens
  source 1..20: mol_type = genomic RNA
tttgggcccgctgcagctcc

SEQ ID NO: 557 - RNA, 20 nt, Homo sapiens
  source 1..20: mol_type = genomic RNA
cccgctgcagctccctgtcc

SEQ ID NO: 558 - RNA, 20 nt, Homo sapiens
  source 1..20: mol_type = genomic RNA
ctccctgtcccggcgggtcc

SEQ ID NO: 559 - RNA, 20 nt, Homo sapiens
  source 1..20: mol_type = genomic RNA
cgggtcccaggctacggcgg

SEQ ID NO: 560 - RNA, 20 nt, Homo sapiens
  source 1..20: mol_type = genomic RNA
ggtcccaggctacggcgggg

SEQ ID NO: 561 - RNA, 20 nt, Homo sapiens
  source 1..20: mol_type = genomic RNA
cccaggctacggcggggatg

SEQ ID NO: 562 - RNA, 20 nt, Homo sapiens
  source 1..20: mol_type = genomic RNA
ccaggctacggcggggatgg

SEQ ID NO: 563 - RNA, 20 nt, Homo sapiens
  source 1..20: mol_type = genomic RNA
tacggcggggatggcggtaa

SEQ ID NO: 564 - RNA, 20 nt, Homo sapiens
  source 1..20: mol_type = genomic RNA
acggcggggatggcggtaac

SEQ ID NO: 565 - RNA, 20 nt, Homo sapiens
  source 1..20: mol_type = genomic RNA
ggggatggcggtaaccctgc

SEQ ID NO: 566 - RNA, 20 nt, Homo sapiens
  source 1..20: mol_type = genomic RNA
gatggcggtaaccctgcagc

SEQ ID NO: 567 - RNA, 20 nt, Homo sapiens
  source 1..20: mol_type = genomic RNA
ggcggtaaccctgcagcctg

SEQ ID NO: 568 - RNA, 20 nt, Homo sapiens
  source 1..20: mol_type = genomic RNA
gcggtaaccctgcagcctgc

SEQ ID NO: 569 - RNA, 20 nt, Homo sapiens
  source 1..20: mol_type = genomic RNA
ggtaaccctgcagcctgcgg

SEQ ID NO: 570 - RNA, 20 nt, Homo sapiens
  source 1..20: mol_type = genomic RNA
cgggccggcgacacgaaccc

SEQ ID NO: 571 - RNA, 20 nt, Homo sapiens
  source 1..20: mol_type = genomic RNA
ccccgcagagacagagtgac

SEQ ID NO: 572 - RNA, 20 nt, Homo sapiens
  source 1..20: mol_type = genomic RNA
cgcagagacagagtgaccca

SEQ ID NO: 573 - RNA, 20 nt, Homo sapiens
  source 1..20: mol_type = genomic RNA
agacagagtgacccagcaac

SEQ ID NO: 574 - RNA, 20 nt, Homo sapiens
  source 1..20: mol_type = genomic RNA
caacccagagcccatgaggg

SEQ ID NO: 575 - RNA, 20 nt, Homo sapiens
  source 1..20: mol_type = genomic RNA
gagcccatgagggacacccg

SEQ ID NO: 576 - RNA, 20 nt, Homo sapiens
  source 1..20: mol_type = genomic RNA
tcagccccgctccctcactt

SEQ ID NO: 577 - RNA, 20 nt, Homo sapiens
  source 1..20: mol_type = genomic RNA
cagccccgctccctcacttg

SEQ ID NO: 578 - RNA, 20 nt, Homo sapiens
  source 1..20: mol_type = genomic RNA
agccccgctccctcacttgg

SEQ ID NO: 579 - RNA, 20 nt, Homo sapiens
  source 1..20: mol_type = genomic RNA
gccccgctccctcacttggg

SEQ ID NO: 580 - RNA, 20 nt, Homo sapiens
  source 1..20: mol_type = genomic RNA
cccgctccctcacttgggtc

SEQ ID NO: 581 - RNA, 20 nt, Homo sapiens
  source 1..20: mol_type = genomic RNA
cgctccctcacttgggtctt

SEQ ID NO: 582 - RNA, 20 nt, Homo sapiens
  source 1..20: mol_type = genomic RNA
gctccctcacttgggtcttc

SEQ ID NO: 583 - RNA, 20 nt, Homo sapiens
  source 1..20: mol_type = genomic RNA
tccctcacttgggtcttccc

SEQ ID NO: 584 - RNA, 20 nt, Homo sapiens
  source 1..20: mol_type = genomic RNA
acttgggtcttcccttgtcc

SEQ ID NO: 585 - RNA, 20 nt, Homo sapiens
  source 1..20: mol_type = genomic RNA
tgggtcttcccttgtcctct

SEQ ID NO: 586 - RNA, 20 nt, Homo sapiens
  source 1..20: mol_type = genomic RNA
tcttcccttgtcctctcgcg

SEQ ID NO: 587 - RNA, 20 nt, Homo sapiens
  source 1..20: mol_type = genomic RNA
cttcccttgtcctctcgcga

SEQ ID NO: 588 - RNA, 20 nt, Homo sapiens
  source 1..20: mol_type = genomic RNA
ttcccttgtcctctcgcgag

SEQ ID NO: 589 - RNA, 20 nt, Homo sapiens
  source 1..20: mol_type = genomic RNA
tcccttgtcctctcgcgagg

SEQ ID NO: 590 - RNA, 20 nt, Homo sapiens
  source 1..20: mol_type = genomic RNA
gaggggaggcagagccttgt

SEQ ID NO: 591 - RNA, 20 nt, Homo sapiens
  source 1..20: mol_type = genomic RNA
aggggaggcagagccttgtt

SEQ ID NO: 592 - RNA, 20 nt, Homo sapiens
  source 1..20: mol_type = genomic RNA
gggaggcagagccttgttgg

SEQ ID NO: 593 - RNA, 20 nt, Homo sapiens
  source 1..20: mol_type = genomic RNA
ggaggcagagccttgttggg

SEQ ID NO: 594 - RNA, 20 nt, Homo sapiens
  source 1..20: mol_type = genomic RNA
gaggcagagccttgttgggg

SEQ ID NO: 595 - RNA, 20 nt, Homo sapiens
  source 1..20: mol_type = genomic RNA
aggcagagccttgttggggc

SEQ ID NO: 596 - RNA, 20 nt, Homo sapiens
  source 1..20: mol_type = genomic RNA
agagccttgttggggcctgt

SEQ ID NO: 597 - RNA, 20 nt, Homo sapiens
  source 1..20: mol_type = genomic RNA
gagccttgttggggcctgtc

SEQ ID NO: 598 - RNA, 20 nt, Homo sapiens
  source 1..20: mol_type = genomic RNA
agccttgttggggcctgtcc

SEQ ID NO: 599 - RNA, 20 nt, Homo sapiens
  source 1..20: mol_type = genomic RNA
ccttgttggggcctgtcctg

SEQ ID NO: 600 - RNA, 20 nt, Homo sapiens
  source 1..20: mol_type = genomic RNA
tggggcctgtcctgaattca

SEQ ID NO: 601 - RNA, 20 nt, Homo sapiens
  source 1..20: mol_type = genomic RNA
ggggcctgtcctgaattcac

SEQ ID NO: 602 - RNA, 20 nt, Homo sapiens
  source 1..20: mol_type = genomic RNA
gcctgcgggccggcgacacg

SEQ ID NO: 603 - RNA, 20 nt, Homo sapiens
  source 1..20: mol_type = genomic RNA
cctgcgggccggcgacacga

SEQ ID NO: 604 - RNA, 20 nt, Homo sapiens
  source 1..20: mol_type = genomic RNA
ctgcgggccggcgacacgaa

SEQ ID NO: 605 - RNA, 20 nt, Homo sapiens
  source 1..20: mol_type = genomic RNA
tgcgggccggcgacacgaac

SEQ ID NO: 606 - RNA, 20 nt, Homo sapiens
  source 1..20: mol_type = genomic RNA
gcgggccggcgacacgaacc

SEQ ID NO: 607 - RNA, 20 nt, Homo sapiens
  source 1..20: mol_type = genomic RNA
gggccggcgacacgaacccc

SEQ ID NO: 608 - RNA, 20 nt, Homo sapiens
  source 1..20: mol_type = genomic RNA
ggccggcgacacgaaccccc

SEQ ID NO: 609 - RNA, 20 nt, Homo sapiens
  source 1..20: mol_type = genomic RNA
aacccccggccccgcagaga

SEQ ID NO: 610 - RNA, 20 nt, Homo sapiens
  source 1..20: mol_type = genomic RNA
acccccggccccgcagagac

SEQ ID NO: 611 - RNA, 20 nt, Homo sapiens
  source 1..20: mol_type = genomic RNA
cccccggccccgcagagaca

SEQ ID NO: 612 - RNA, 20 nt, Homo sapiens
  source 1..20: mol_type = genomic RNA
ccggccccgcagagacagag

SEQ ID NO: 613 - RNA, 20 nt, Homo sapiens
  source 1..20: mol_type = genomic RNA
ggccccgcagagacagagtg

SEQ ID NO: 614 - RNA, 20 nt, Homo sapiens
  source 1..20: mol_type = genomic RNA
gcagagacagagtgacccag

SEQ ID NO: 615 - RNA, 20 nt, Homo sapiens
  source 1..20: mol_type = genomic RNA
cagagacagagtgacccagc

SEQ ID NO: 616 - RNA, 20 nt, Homo sapiens
  source 1..20: mol_type = genomic RNA
agagacagagtgacccagca

SEQ ID NO: 617 - RNA, 20 nt, Homo sapiens
  source 1..20: mol_type = genomic RNA
gacagagtgacccagcaacc

SEQ ID NO: 618 - RNA, 20 nt, Homo sapiens
  source 1..20: mol_type = genomic RNA
acagagtgacccagcaaccc

SEQ ID NO: 619 - RNA, 20 nt, Homo sapiens
  source 1..20: mol_type = genomic RNA
cagagtgacccagcaaccca

SEQ ID NO: 620 - RNA, 20 nt, Homo sapiens
  source 1..20: mol_type = genomic RNA
agtgacccagcaacccagag

SEQ ID NO: 621 - RNA, 20 nt, Homo sapiens
  source 1..20: mol_type = genomic RNA
agcaacccagagcccatgag

SEQ ID NO: 622 - RNA, 20 nt, Homo sapiens
  source 1..20: mol_type = genomic RNA
gcaacccagagcccatgagg

SEQ ID NO: 623 - RNA, 20 nt, Homo sapiens
  source 1..20: mol_type = genomic RNA
aacccagagcccatgaggga

SEQ ID NO: 624 - RNA, 20 nt, Homo sapiens
  source 1..20: mol_type = genomic RNA
acccagagcccatgagggac

SEQ ID NO: 625 - RNA, 20 nt, Homo sapiens
  source 1..20: mol_type = genomic RNA
cccagagcccatgagggaca

SEQ ID NO: 626 - RNA, 20 nt, Homo sapiens
  source 1..20: mol_type = genomic RNA
ctatttccgatctggatgtg

SEQ ID NO: 627 - RNA, 20 nt, Homo sapiens
  source 1..20: mol_type = genomic RNA
tatttccgatctggatgtgt

SEQ ID NO: 628 - RNA, 20 nt, Homo sapiens
  source 1..20: mol_type = genomic RNA
atttccgatctggatgtgtc

SEQ ID NO: 629 - RNA, 20 nt, Homo sapiens
  source 1..20: mol_type = genomic RNA
tttccgatctggatgtgtcc

SEQ ID NO: 630 - RNA, 20 nt, Homo sapiens
  source 1..20: mol_type = genomic RNA
tccgatctggatgtgtccca

SEQ ID NO: 631 - RNA, 20 nt, Homo sapiens
  source 1..20: mol_type = genomic RNA
ccgatctggatgtgtcccag

SEQ ID NO: 632 - RNA, 20 nt, Homo sapiens
  source 1..20: mol_type = genomic RNA
gatctggatgtgtcccagat

SEQ ID NO: 633 - RNA, 20 nt, Homo sapiens
  source 1..20: mol_type = genomic RNA
ctggatgtgtcccagatggc

SEQ ID NO: 634 - RNA, 20 nt, Homo sapiens
  source 1..20: mol_type = genomic RNA
tggatgtgtcccagatggca

SEQ ID NO: 635 - RNA, 20 nt, Homo sapiens
  source 1..20: mol_type = genomic RNA
ggatgtgtcccagatggcat

SEQ ID NO: 636 - RNA, 20 nt, Homo sapiens
  source 1..20: mol_type = genomic RNA
gatgtgtcccagatggcatt

SEQ ID NO: 637 - RNA, 20 nt, Homo sapiens
  source 1..20: mol_type = genomic RNA
atgtgtcccagatggcattt

SEQ ID NO: 638 - RNA, 21 nt, synthetic construct
  source 1..21: mol_type = other RNA
tcagcgggcccaaactcagtt

SEQ ID NO: 639 - RNA, 21 nt, synthetic construct
  source 1..21: mol_type = other RNA
ttgcagcgggcccaaactcat

SEQ ID NO: 640 - RNA, 21 nt, synthetic construct
  source 1..21: mol_type = other RNA
tgagctgcagcgggcccaaat

SEQ ID NO: 641 - RNA, 21 nt, synthetic construct
  source 1..21: mol_type = other RNA
tgacagggagctgcagcgggt

SEQ ID NO: 642 - RNA, 21 nt, synthetic construct
  source 1..21: mol_type = other RNA
tgacccgccgggacagggagt

SEQ ID NO: 643 - RNA, 21 nt, synthetic construct
  source 1..21: mol_type = other RNA
tcgccgtagcctgggacccgt

SEQ ID NO: 644 - RNA, 21 nt, synthetic construct
  source 1..21: mol_type = other RNA
tcccgccgtagcctgggacct

SEQ ID NO: 645 - RNA, 21 nt, synthetic construct
  source 1..21: mol_type = other RNA
tatccccgccgtagcctgggt

SEQ ID NO: 646 - RNA, 21 nt, synthetic construct
  source 1..21: mol_type = other RNA
tcatccccgccgtagcctggt

SEQ ID NO: 647 - RNA, 21 nt, synthetic construct
  source 1..21: mol_type = other RNA
ttaccgccatccccgccgtat

SEQ ID NO: 648 - RNA, 21 nt, synthetic construct
  source 1..21: mol_type = other RNA
tttaccgccatccccgccgtt

SEQ ID NO: 649 - RNA, 21 nt, synthetic construct
  source 1..21: mol_type = other RNA
tcagggttaccgccatcccct

SEQ ID NO: 650 - RNA, 21 nt, synthetic construct
  source 1..21: mol_type = other RNA
tctgcagggttaccgccatct

SEQ ID NO: 651 - RNA, 21 nt, synthetic construct
  source 1..21: mol_type = other RNA
taggctgcagggttaccgcct

SEQ ID NO: 652 - RNA, 21 nt, synthetic construct
  source 1..21: mol_type = other RNA
tcaggctgcagggttaccgct

SEQ ID NO: 653 - RNA, 21 nt, synthetic construct
  source 1..21: mol_type = other RNA
tcgcaggctgcagggttacct

SEQ ID NO: 654 - RNA, 21 nt, synthetic construct
  source 1..21: mol_type = other RNA
tggttcgtgtcgccggcccgt

SEQ ID NO: 655 - RNA, 21 nt, synthetic construct
  source 1..21: mol_type = other RNA
ttcactctgtctctgcggggt

SEQ ID NO: 656 - RNA, 21 nt, synthetic construct
  source 1..21: mol_type = other RNA
tgggtcactctgtctctgcgt

SEQ ID NO: 657 - RNA, 21 nt, synthetic construct
  source 1..21: mol_type = other RNA
tttgctgggtcactctgtctt

SEQ ID NO: 658 - RNA, 21 nt, synthetic construct
  source 1..21: mol_type = other RNA
tcctcatgggctctgggttgt

SEQ ID NO: 659 - RNA, 21 nt, synthetic construct
  source 1..21: mol_type = other RNA
tgggtgtccctcatgggctct

SEQ ID NO: 660 - RNA, 21 nt, synthetic construct
  source 1..21: mol_type = other RNA
tagtgagggagcggggctgat

SEQ ID NO: 661 - RNA, 21 nt, synthetic construct
  source 1..21: mol_type = other RNA
taagtgagggagcggggctgt

SEQ ID NO: 662 - RNA, 21 nt, synthetic construct
  source 1..21: mol_type = other RNA
tcaagtgagggagcggggctt

SEQ ID NO: 663 - RNA, 21 nt, synthetic construct
  source 1..21: mol_type = other RNA
tccaagtgagggagcggggct

SEQ ID NO: 664 - RNA, 21 nt, synthetic construct
  source 1..21: mol_type = other RNA
tacccaagtgagggagcgggt

SEQ ID NO: 665 - RNA, 21 nt, synthetic construct
  source 1..21: mol_type = other RNA
tagacccaagtgagggagcgt

SEQ ID NO: 666 - RNA, 21 nt, synthetic construct
  source 1..21: mol_type = other RNA
taagacccaagtgagggagct

SEQ ID NO: 667 - RNA, 21 nt, synthetic construct
  source 1..21: mol_type = other RNA
tggaagacccaagtgagggat

SEQ ID NO: 668 - RNA, 21 nt, synthetic construct
  source 1..21: mol_type = other RNA
tgacaagggaagacccaagtt

SEQ ID NO: 669 - RNA, 21 nt, synthetic construct
  source 1..21: mol_type = other RNA
tgaggacaagggaagacccat

SEQ ID NO: 670 - RNA, 21 nt, synthetic construct
  source 1..21: mol_type = other RNA
tgcgagaggacaagggaagat

SEQ ID NO: 671 - RNA, 21 nt, synthetic construct
  source 1..21: mol_type = other RNA
tcgcgagaggacaagggaagt

SEQ ID NO: 672 - RNA, 21 nt, synthetic construct
  source 1..21: mol_type = other RNA
ttcgcgagaggacaagggaat

SEQ ID NO: 673 - RNA, 21 nt, synthetic construct
  source 1..21: mol_type = other RNA
tctcgcgagaggacaagggat

SEQ ID NO: 674 - RNA, 21 nt, synthetic construct
  source 1..21: mol_type = other RNA
tcaaggctctgcctcccctct

SEQ ID NO: 675 - RNA, 21 nt, synthetic construct
  source 1..21: mol_type = other RNA
tacaaggctctgcctcccctt

SEQ ID NO: 676 - RNA, 21 nt, synthetic construct
  source 1..21: mol_type = other RNA
tcaacaaggctctgcctccct

SEQ ID NO: 677 - RNA, 21 nt, synthetic construct
  source 1..21: mol_type = other RNA
tccaacaaggctctgcctcct

SEQ ID NO: 678 - RNA, 21 nt, synthetic construct
  source 1..21: mol_type = other RNA
tcccaacaaggctctgcctct

SEQ ID NO: 679 - RNA, 21 nt, synthetic construct
  source 1..21: mol_type = other RNA
tccccaacaaggctctgcctt

SEQ ID NO: 680 - RNA, 21 nt, synthetic construct
  source 1..21: mol_type = other RNA
tcaggccccaacaaggctctt

SEQ ID NO: 681 - RNA, 21 nt, synthetic construct
  source 1..21: mol_type = other RNA
tacaggccccaacaaggctct

SEQ ID NO: 682 - RNA, 21 nt, synthetic construct
  source 1..21: mol_type = other RNA
tgacaggccccaacaaggctt

SEQ ID NO: 683 - RNA, 21 nt, synthetic construct
  source 1..21: mol_type = other RNA
taggacaggccccaacaaggt

SEQ ID NO: 684 - RNA, 21 nt, synthetic construct
  source 1..21: mol_type = other RNA
tgaattcaggacaggccccat

SEQ ID NO: 685 - RNA, 21 nt, synthetic construct
  source 1..21: mol_type = other RNA
ttgaattcaggacaggcccct

SEQ ID NO: 686 - RNA, 21 nt, synthetic construct
  source 1..21: mol_type = other RNA
tgtgtcgccggcccgcaggct

SEQ ID NO: 687 - RNA, 21 nt, synthetic construct
  source 1..21: mol_type = other RNA
tcgtgtcgccggcccgcaggt

SEQ ID NO: 688 - RNA, 21 nt, synthetic construct
  source 1..21: mol_type = other RNA
ttcgtgtcgccggcccgcagt

SEQ ID NO: 689 - RNA, 21 nt, synthetic construct
  source 1..21: mol_type = other RNA
tttcgtgtcgccggcccgcat

SEQ ID NO: 690 - RNA, 21 nt, synthetic construct
  source 1..21: mol_type = other RNA
tgttcgtgtcgccggcccgct

SEQ ID NO: 691 - RNA, 21 nt, synthetic construct
  source 1..21: mol_type = other RNA
tgggttcgtgtcgccggccct

SEQ ID NO: 692 - RNA, 21 nt, synthetic construct
  source 1..21: mol_type = other RNA
tggggttcgtgtcgccggcct

SEQ ID NO: 693 - RNA, 21 nt, synthetic construct
  source 1..21: mol_type = other RNA
tctctgcggggccgggggttt

SEQ ID NO: 694 - RNA, 21 nt, synthetic construct
  source 1..21: mol_type = other RNA
ttctctgcggggccgggggtt

SEQ ID NO: 695 - RNA, 21 nt, synthetic construct
  source 1..21: mol_type = other RNA
tgtctctgcggggccgggggt

SEQ ID NO: 696 - RNA, 21 nt, synthetic construct
  source 1..21: mol_type = other RNA
ttctgtctctgcggggccggt

SEQ ID NO: 697 - RNA, 21 nt, synthetic construct
  source 1..21: mol_type = other RNA
tactctgtctctgcggggcct

SEQ ID NO: 698 - RNA, 21 nt, synthetic construct
  source 1..21: mol_type = other RNA
ttgggtcactctgtctctgct

SEQ ID NO: 699 - RNA, 21 nt, synthetic construct
  source 1..21: mol_type = other RNA
tctgggtcactctgtctctgt

SEQ ID NO: 700 - RNA, 21 nt, synthetic construct
  source 1..21: mol_type = other RNA
tgctgggtcactctgtctctt

SEQ ID NO: 701 - RNA, 21 nt, synthetic construct
  source 1..21: mol_type = other RNA
tgttgctgggtcactctgtct

SEQ ID NO: 702 - RNA, 21 nt, synthetic construct
  source 1..21: mol_type = other RNA
tggttgctgggtcactctgtt

SEQ ID NO: 703 - RNA, 21 nt, synthetic construct
  source 1..21: mol_type = other RNA
tgggttgctgggtcactctgt

SEQ ID NO: 704 - RNA, 21 nt, synthetic construct
  source 1..21: mol_type = other RNA
ttctgggttgctgggtcactt

SEQ ID NO: 705 - RNA, 21 nt, synthetic construct
  source 1..21: mol_type = other RNA
ttcatgggctctgggttgctt

SEQ ID NO: 706 - RNA, 21 nt, synthetic construct
  source 1..21: mol_type = other RNA
tctcatgggctctgggttgct

SEQ ID NO: 707 - RNA, 21 nt, synthetic construct
  source 1..21: mol_type = other RNA
tccctcatgggctctgggttt

SEQ ID NO: 708 - RNA, 21 nt, synthetic construct
  source 1..21: mol_type = other RNA
ttccctcatgggctctgggtt

SEQ ID NO: 709 - RNA, 21 nt, synthetic construct
  source 1..21: mol_type = other RNA
tgtccctcatgggctctgggt

SEQ ID NO: 710 - RNA, 21 nt, synthetic construct
  source 1..21: mol_type = other RNA
tacatccagatcggaaatagt

SEQ ID NO: 711 - RNA, 21 nt, synthetic construct
  source 1..21: mol_type = other RNA
tcacatccagatcggaaatat

SEQ ID NO: 712 - RNA, 21 nt, synthetic construct
  source 1..21: mol_type = other RNA
tacacatccagatcggaaatt

SEQ ID NO: 713 - RNA, 21 nt, synthetic construct
  source 1..21: mol_type = other RNA
tgacacatccagatcggaaat

SEQ ID NO: 714 - RNA, 21 nt, synthetic construct
  source 1..21: mol_type = other RNA
tgggacacatccagatcggat

SEQ ID NO: 715 - RNA, 21 nt, synthetic construct
  source 1..21: mol_type = other RNA
ttgggacacatccagatcggt

SEQ ID NO: 716 - RNA, 21 nt, synthetic construct
  source 1..21: mol_type = other RNA
ttctgggacacatccagatct

SEQ ID NO: 717 - RNA, 21 nt, synthetic construct
  source 1..21: mol_type = other RNA
tccatctgggacacatccagt

SEQ ID NO: 718 - RNA, 21 nt, synthetic construct
  source 1..21: mol_type = other RNA
tgccatctgggacacatccat

SEQ ID NO: 719 - RNA, 21 nt, synthetic construct
  source 1..21: mol_type = other RNA
ttgccatctgggacacatcct

SEQ ID NO: 720 - RNA, 21 nt, synthetic construct
  source 1..21: mol_type = other RNA
tatgccatctgggacacatct

SEQ ID NO: 721 - RNA, 21 nt, synthetic construct
  source 1..21: mol_type = other RNA
taatgccatctgggacacatt

SEQ ID NO: 722 - RNA, 21 nt, synthetic construct
  source 1..21: mol_type = other RNA
tcaaatgccatctgggacact

SEQ ID NO: 723 - RNA, 21 nt, synthetic construct
  source 1..21: mol_type = other RNA
taccaaatgccatctgggact

SEQ ID NO: 724 - RNA, 21 nt, synthetic construct
  source 1..21: mol_type = other RNA
ttaccaaatgccatctgggat

SEQ ID NO: 725 - RNA, 21 nt, synthetic construct
  source 1..21: mol_type = other RNA
tttaccaaatgccatctgggt

SEQ ID NO: 726 - RNA, 21 nt, synthetic construct
  source 1..21: mol_type = other RNA
tcttaccaaatgccatctggt

SEQ ID NO: 727 - RNA, 21 nt, synthetic construct
  source 1..21: mol_type = other RNA
ttcttaccaaatgccatctgt

SEQ ID NO: 728 - RNA, 21 nt, synthetic construct
  source 1..21: mol_type = other RNA
tttcttaccaaatgccatctt

SEQ ID NO: 729 - RNA, 21 nt, synthetic construct
  source 1..21: mol_type = other RNA
tattcttaccaaatgccatct

SEQ ID NO: 730 - RNA, 21 nt, synthetic construct
  source 1..21: mol_type = other RNA
ttattcttaccaaatgccatt

SEQ ID NO: 731 - RNA, 21 nt, synthetic construct
  source 1..21: mol_type = other RNA
tatattcttaccaaatgccat

SEQ ID NO: 732 - RNA, 21 nt, synthetic construct
  source 1..21: mol_type = other RNA
tgatattcttaccaaatgcct

SEQ ID NO: 733 - RNA, 21 nt, synthetic construct
  source 1..21: mol_type = other RNA
tagatattcttaccaaatgct

SEQ ID NO: 734 - RNA, 16 nt, synthetic construct
  source 1..16: mol_type = other RNA
agtttgggcccgctga

SEQ ID NO: 735 - RNA, 16 nt, synthetic construct
  source 1..16: mol_type = other RNA
tttgggcccgctgcaa

SEQ ID NO: 736 - RNA, 16 nt, synthetic construct
  source 1..16: mol_type = other RNA
ggcccgctgcagctca

SEQ ID NO: 737 - RNA, 16 nt, synthetic construct
  source 1..16: mol_type = other RNA
ctgcagctccctgtca

SEQ ID NO: 738 - RNA, 16 nt, synthetic construct
  source 1..16: mol_type = other RNA
ctgtcccggcgggtca

SEQ ID NO: 739 - RNA, 16 nt, synthetic construct
  source 1..16: mol_type = other RNA
tcccaggctacggcga

SEQ ID NO: 740 - RNA, 16 nt, synthetic construct
  source 1..16: mol_type = other RNA
ccaggctacggcggga

SEQ ID NO: 741 - RNA, 16 nt, synthetic construct
  source 1..16: mol_type = other RNA
ggctacggcggggata

SEQ ID NO: 742 - RNA, 16 nt, synthetic construct
  source 1..16: mol_type = other RNA
gctacggcggggatga

SEQ ID NO: 743 - RNA, 16 nt, synthetic construct
  source 1..16: mol_type = other RNA
gcggggatggcggtaa

SEQ ID NO: 744 - RNA, 16 nt, synthetic construct
  source 1..16: mol_type = other RNA
cggggatggcggtaaa

SEQ ID NO: 745 - RNA, 16 nt, synthetic construct
  source 1..16: mol_type = other RNA
atggcggtaaccctga

SEQ ID NO: 746 - RNA, 16 nt, synthetic construct
  source 1..16: mol_type = other RNA
gcggtaaccctgcaga

SEQ ID NO: 747 - RNA, 16 nt, synthetic construct
  source 1..16: mol_type = other RNA
gtaaccctgcagccta

SEQ ID NO: 748 - RNA, 16 nt, synthetic construct
  source 1..16: mol_type = other RNA
taaccctgcagcctga

SEQ ID NO: 749 - RNA, 16 nt, synthetic construct
  source 1..16: mol_type = other RNA
accctgcagcctgcga

SEQ ID NO: 750 - RNA, 16 nt, synthetic construct
  source 1..16: mol_type = other RNA
ccggcgacacgaacca

SEQ ID NO: 751 - RNA, 16 nt, synthetic construct
  source 1..16: mol_type = other RNA
gcagagacagagtgaa

SEQ ID NO: 752 - RNA, 16 nt, synthetic construct
  source 1..16: mol_type = other RNA
gagacagagtgaccca

SEQ ID NO: 753 - RNA, 16 nt, synthetic construct
  source 1..16: mol_type = other RNA
agagtgacccagcaaa

SEQ ID NO: 754 - RNA, 16 nt, synthetic construct
  source 1..16: mol_type = other RNA
ccagagcccatgagga

SEQ ID NO: 755 - RNA, 16 nt, synthetic construct
  source 1..16: mol_type = other RNA
ccatgagggacaccca

SEQ ID NO: 756 - RNA, 16 nt, synthetic construct
  source 1..16: mol_type = other RNA
ccccgctccctcacta

SEQ ID NO: 757 - RNA, 16 nt, synthetic construct
  source 1..16: mol_type = other RNA
cccgctccctcactta

SEQ ID NO: 758 - RNA, 16 nt, synthetic construct
  source 1..16: mol_type = other RNA
ccgctccctcacttga

SEQ ID NO: 759 - RNA, 16 nt, synthetic construct
  source 1..16: mol_type = other RNA
cgctccctcacttgga

SEQ ID NO: 760 - RNA, 16 nt, synthetic construct
  source 1..16: mol_type = other RNA
ctccctcacttgggta

SEQ ID NO: 761 - RNA, 16 nt, synthetic construct
  source 1..16: mol_type = other RNA
ccctcacttgggtcta

SEQ ID NO: 762 - RNA, 16 nt, synthetic construct
  source 1..16: mol_type = other RNA
cctcacttgggtctta

SEQ ID NO: 763 - RNA, 16 nt, synthetic construct
  source 1..16: mol_type = other RNA
tcacttgggtcttcca

SEQ ID NO: 764 - RNA, 16 nt, synthetic construct
  source 1..16: mol_type = other RNA
gggtcttcccttgtca

SEQ ID NO: 765 - RNA, 16 nt, synthetic construct
  source 1..16: mol_type = other RNA
tcttcccttgtcctca

SEQ ID NO: 766 - RNA, 16 nt, synthetic construct
  source 1..16: mol_type = other RNA
cccttgtcctctcgca

SEQ ID NO: 767 - RNA, 16 nt, synthetic construct
  source 1..16: mol_type = other RNA
ccttgtcctctcgcga

SEQ ID NO: 768 - RNA, 16 nt, synthetic construct
  source 1..16: mol_type = other RNA
cttgtcctctcgcgaa

SEQ ID NO: 769 - RNA, 16 nt, synthetic construct
  source 1..16: mol_type = other RNA
ttgtcctctcgcgaga

SEQ ID NO: 770 - RNA, 16 nt, synthetic construct
  source 1..16: mol_type = other RNA
ggaggcagagccttga

SEQ ID NO: 771 - RNA, 16 nt, synthetic construct
  source 1..16: mol_type = other RNA
gaggcagagccttgta

SEQ ID NO: 772 - RNA, 16 nt, synthetic construct
  source 1..16: mol_type = other RNA
ggcagagccttgttga

SEQ ID NO: 773 - RNA, 16 nt, synthetic construct
  source 1..16: mol_type = other RNA
gcagagccttgttgga

SEQ ID NO: 774 - RNA, 16 nt, synthetic construct
  source 1..16: mol_type = other RNA
cagagccttgttggga

SEQ ID NO: 775 - RNA, 16 nt, synthetic construct
  source 1..16: mol_type = other RNA
agagccttgttgggga

SEQ ID NO: 776 - RNA, 16 nt, synthetic construct
  source 1..16: mol_type = other RNA
ccttgttggggcctga

SEQ ID NO: 777 - RNA, 16 nt, synthetic construct
  source 1..16: mol_type = other RNA
cttgttggggcctgta

SEQ ID NO: 778 - RNA, 16 nt, synthetic construct
  source 1..16: mol_type = other RNA
ttgttggggcctgtca

SEQ ID NO: 779 - RNA, 16 nt, synthetic construct
  source 1..16: mol_type = other RNA
gttggggcctgtccta

SEQ ID NO: 780 - RNA, 16 nt, synthetic construct
  source 1..16: mol_type = other RNA
gcctgtcctgaattca

SEQ ID NO: 781 - RNA, 16 nt, synthetic construct
  source 1..16: mol_type = other RNA
cctgtcctgaattcaa

SEQ ID NO: 782 - RNA, 16 nt, synthetic construct
  source 1..16: mol_type = other RNA
gcgggccggcgacaca

SEQ ID NO: 783 - RNA, 16 nt, synthetic construct
  source 1..16: mol_type = other RNA
cgggccggcgacacga

SEQ ID NO: 784 - RNA, 16 nt, synthetic construct
  source 1..16: mol_type = other RNA
gggccggcgacacgaa

SEQ ID NO: 785 - RNA, 16 nt, synthetic construct
  source 1..16: mol_type = other RNA
ggccggcgacacgaaa

SEQ ID NO: 786 - RNA, 16 nt, synthetic construct
  source 1..16: mol_type = other RNA
gccggcgacacgaaca

SEQ ID NO: 787 - RNA, 16 nt, synthetic construct
  source 1..16: mol_type = other RNA
cggcgacacgaaccca

SEQ ID NO: 788 - RNA, 16 nt, synthetic construct
  source 1..16: mol_type = other RNA
ggcgacacgaacccca

SEQ ID NO: 789 - RNA, 16 nt, synthetic construct
  source 1..16: mol_type = other RNA
cccggccccgcagaga

SEQ ID NO: 790 - RNA, 16 nt, synthetic construct
  source 1..16: mol_type = other RNA
ccggccccgcagagaa

SEQ ID NO: 791 - RNA, 16 nt, synthetic construct
  source 1..16: mol_type = other RNA
cggccccgcagagaca

SEQ ID NO: 792 - RNA, 16 nt, synthetic construct
  source 1..16: mol_type = other RNA
ccccgcagagacagaa

SEQ ID NO: 793 - RNA, 16 nt, synthetic construct
  source 1..16: mol_type = other RNA
ccgcagagacagagta

SEQ ID NO: 794 - RNA, 16 nt, synthetic construct
  source 1..16: mol_type = other RNA
agacagagtgacccaa

SEQ ID NO: 795 - RNA, 16 nt, synthetic construct
  source 1..16: mol_type = other RNA
gacagagtgacccaga

SEQ ID NO: 796 - RNA, 16 nt, synthetic construct
  source 1..16: mol_type = other RNA
acagagtgacccagca

SEQ ID NO: 797 - RNA, 16 nt, synthetic construct
  source 1..16: mol_type = other RNA
gagtgacccagcaaca

SEQ ID NO: 798 - RNA, 16 nt, synthetic construct
  source 1..16: mol_type = other RNA
agtgacccagcaacca

SEQ ID NO: 799 - RNA, 16 nt, synthetic construct
  source 1..16: mol_type = other RNA
gtgacccagcaaccca

SEQ ID NO: 800 - RNA, 16 nt, synthetic construct
  source 1..16: mol_type = other RNA
acccagcaacccagaa

SEQ ID NO: 801 - RNA, 16 nt, synthetic construct
  source 1..16: mol_type = other RNA
acccagagcccatgaa

SEQ ID NO: 802 - RNA, 16 nt, synthetic construct
  source 1..16: mol_type = other RNA
cccagagcccatgaga

SEQ ID NO: 803 - RNA, 16 nt, synthetic construct
  source 1..16: mol_type = other RNA
cagagcccatgaggga

SEQ ID NO: 804 - RNA, 16 nt, synthetic construct
  source 1..16: mol_type = other RNA
agagcccatgagggaa

SEQ ID NO: 805 - RNA, 16 nt, synthetic construct
  source 1..16: mol_type = other RNA
gagcccatgagggaca

SEQ ID NO: 806 - RNA, 16 nt, synthetic construct
  source 1..16: mol_type = other RNA
ttccgatctggatgta

SEQ ID NO: 807 - RNA, 16 nt, synthetic construct
  source 1..16: mol_type = other RNA
tccgatctggatgtga

SEQ ID NO: 808 - RNA, 16 nt, synthetic construct
  source 1..16: mol_type = other RNA
ccgatctggatgtgta

SEQ ID NO: 809 - RNA, 16 nt, synthetic construct
  source 1..16: mol_type = other RNA
cgatctggatgtgtca

SEQ ID NO: 810 - RNA, 16 nt, synthetic construct
  source 1..16: mol_type = other RNA
atctggatgtgtccca

SEQ ID NO: 811 - RNA, 16 nt, synthetic construct
  source 1..16: mol_type = other RNA
tctggatgtgtcccaa

SEQ ID NO: 812 - RNA, 16 nt, synthetic construct
  source 1..16: mol_type = other RNA
tggatgtgtcccagaa

SEQ ID NO: 813 - RNA, 16 nt, synthetic construct
  source 1..16: mol_type = other RNA
atgtgtcccagatgga

SEQ ID NO: 814 - RNA, 16 nt, synthetic construct
  source 1..16: mol_type = other RNA
tgtgtcccagatggca

SEQ ID NO: 815 - RNA, 16 nt, synthetic construct
  source 1..16: mol_type = other RNA
gtgtcccagatggcaa

SEQ ID NO: 816 - RNA, 16 nt, synthetic construct
  source 1..16: mol_type = other RNA
tgtcccagatggcata

SEQ ID NO: 817 - RNA, 16 nt, synthetic construct
  source 1..16: mol_type = other RNA
gtcccagatggcatta

SEQ ID NO: 818 - RNA, 16 nt, synthetic construct
  source 1..16: mol_type = other RNA
cccagatggcatttga

SEQ ID NO: 819 - RNA, 16 nt, synthetic construct
  source 1..16: mol_type = other RNA
cagatggcatttggta

SEQ ID NO: 820 - RNA, 16 nt, synthetic construct
  source 1..16: mol_type = other RNA
agatggcatttggtaa

SEQ ID NO: 821 - RNA, 16 nt, synthetic construct
  source 1..16: mol_type = other RNA
gatggcatttggtaaa

SEQ ID NO: 822 - RNA, 16 nt, synthetic construct
  source 1..16: mol_type = other RNA
atggcatttggtaaga

SEQ ID NO: 823 - RNA, 16 nt, synthetic construct
  source 1..16: mol_type = other RNA
tggcatttggtaagaa

SEQ ID NO: 824 - RNA, 16 nt, synthetic construct
  source 1..16: mol_type = other RNA
ggcatttggtaagaaa

SEQ ID NO: 825 - RNA, 16 nt, synthetic construct
  source 1..16: mol_type = other RNA
gcatttggtaagaata

SEQ ID NO: 826 - RNA, 16 nt, synthetic construct
  source 1..16: mol_type = other RNA
catttggtaagaataa

SEQ ID NO: 827 - RNA, 16 nt, synthetic construct
  source 1..16: mol_type = other RNA
atttggtaagaatata

SEQ ID NO: 828 - RNA, 16 nt, synthetic construct
  source 1..16: mol_type = other RNA
tttggtaagaatatca

SEQ ID NO: 829 - RNA, 16 nt, synthetic construct
  source 1..16: mol_type = other RNA
ttggtaagaatatcta

SEQ ID NO: 830 - RNA, 21 nt, synthetic construct
  source 1..21: mol_type = other RNA
  modified_base 1: mod_base = OTHER; note = 5' phosphate 2'-O-methyl uridine phosphorothioate
  modified_base 2: mod_base = OTHER; note = 2'-fluoro cytosine phosphorothioate
  modified_base 3: mod_base = OTHER; note = 2'-O-methyl adenosine
  modified_base 4: mod_base = OTHER; note = 2'-fluoro guanosine
  modified_base 5: mod_base = OTHER; note = 2'-fluoro cytosine
  modified_base 6: mod_base = OTHER; note = 2'-fluoro guanosine
  modified_base 7: mod_base = OTHER; note = 2'-O-methyl guanosine
  modified_base 8: mod_base = OTHER; note = 2'-fluoro guanosine
  modified_base 9: mod_base = OTHER; note = 2'-O-methyl cytosine
  modified_base 10: mod_base = OTHER; note = 2'-fluoro cytosine
  modified_base 11: mod_base = OTHER; note = 2'-O-methyl cytosine
  modified_base 12: mod_base = OTHER; note = 2'-fluoro adenosine
  modified_base 13: mod_base = OTHER; note = 2'-O-methyl adenosine
  modified_base 14: mod_base = OTHER; note = 2'-fluoro adenosine phosphorothioate
  modified_base 15: mod_base = OTHER; note = 2'-O-methyl cytosine phosphorothioate
  modified_base 16: mod_base = OTHER; note = 2'-fluoro uridine phosphorothioate
  modified_base 17: mod_base = OTHER; note = 2'-O-methyl cytosine phosphorothioate
  modified_base 18: mod_base = OTHER; note = 2'-O-methyl adenosine phosphorothioate
  modified_base 19: mod_base = OTHER; note = 2'-O-methyl guanosine phosphorothioate
  modified_base 20: mod_base = OTHER; note = 2'-fluoro uridine phosphorothioate
  modified_base 21: mod_base = OTHER; note = 2'-O-methyl uridine
tcagcgggcccaaactcagtt

SEQ ID NO: 831 - RNA, 21 nt, synthetic construct
  source 1..21: mol_type = other RNA
  modified_base 1: mod_base = OTHER; note = 5' phosphate 2'-O-methyl uridine phosphorothioate
  modified_base 2: mod_base = OTHER; note = 2'-fluoro uridine phosphorothioate
  modified_base 3: mod_base = OTHER; note = 2'-O-methyl guanosine
  modified_base 4: mod_base = OTHER; note = 2'-fluoro cytosine
  modified_base 5: mod_base = OTHER; note = 2'-fluoro adenosine
  modified_base 6: mod_base = OTHER; note = 2'-fluoro guanosine
  modified_base 7: mod_base = OTHER; note = 2'-O-methyl cytosine
  modified_base 8: mod_base = OTHER; note = 2'-fluoro guanosine
  modified_base 9: mod_base = OTHER; note = 2'-O-methyl guanosine
  modified_base 10: mod_base = OTHER; note = 2'-fluoro guanosine
  modified_base 11: mod_base = OTHER; note = 2'-O-methyl cytosine
  modified_base 12: mod_base = OTHER; note = 2'-fluoro cytosine
  modified_base 13: mod_base = OTHER; note = 2'-O-methyl cytosine
  modified_base 14: mod_base = OTHER; note = 2'-fluoro adenosine phosphorothioate
  modified_base 15: mod_base = OTHER; note = 2'-O-methyl adenosine phosphorothioate
  modified_base 16: mod_base = OTHER; note = 2'-fluoro adenosine phosphorothioate
  modified_base 17: mod_base = OTHER; note = 2'-O-methyl cytosine phosphorothioate
  modified_base 18: mod_base = OTHER; note = 2'-O-methyl uridine phosphorothioate
  modified_base 19: mod_base = OTHER; note = 2'-O-methyl cytosine phosphorothioate
  modified_base 20: mod_base = OTHER; note = 2'-fluoro adenosine phosphorothioate
  modified_base 21: mod_base = OTHER; note = 2'-O-methyl uridine
ttgcagcgggcccaaactcat

SEQ ID NO: 832 - RNA, 21 nt, synthetic construct
  source 1..21: mol_type = other RNA
  modified_base 1: mod_base = OTHER; note = 5' phosphate 2'-O-methyl uridine phosphorothioate
  modified_base 2: mod_base = OTHER; note = 2'-fluoro guanosine phosphorothioate
  modified_base 3: mod_base = OTHER; note = 2'-O-methyl adenosine
  modified_base 4: mod_base = OTHER; note = 2'-fluoro guanosine
  modified_base 5: mod_base = OTHER; note = 2'-fluoro cytosine
  modified_base 6: mod_base = OTHER; note = 2'-fluoro uridine
  modified_base 7: mod_base = OTHER; note = 2'-O-methyl guanosine
  modified_base 8: mod_base = OTHER; note = 2'-fluoro cytosine
  modified_base 9: mod_base = OTHER; note = 2'-O-methyl adenosine
  modified_base 10: mod_base = OTHER; note = 2'-fluoro guanosine
  modified_base 11: mod_base = OTHER; note = 2'-O-methyl cytosine
  modified_base 12: mod_base = OTHER; note = 2'-fluoro guanosine
  modified_base 13: mod_base = OTHER; note = 2'-O-methyl guanosine
  modified_base 14: mod_base = OTHER; note = 2'-fluoro guanosine phosphorothioate
  modified_base 15: mod_base = OTHER; note = 2'-O-methyl cytosine phosphorothioate
  modified_base 16: mod_base = OTHER; note = 2'-fluoro cytosine phosphorothioate
  modified_base 17: mod_base = OTHER; note = 2'-O-methyl cytosine phosphorothioate
  modified_base 18: mod_base = OTHER; note = 2'-O-methyl adenosine phosphorothioate
  modified_base 19: mod_base = OTHER; note = 2'-O-methyl adenosine phosphorothioate
  modified_base 20: mod_base = OTHER; note = 2'-fluoro adenosine phosphorothioate
  modified_base 21: mod_base = OTHER; note = 2'-O-methyl uridine
tgagctgcagcgggcccaaat

SEQ ID NO: 833 - RNA, 21 nt, synthetic construct
  source 1..21: mol_type = other RNA
  modified_base 1: mod_base = OTHER; note = 5' phosphate 2'-O-methyl uridine phosphorothioate
  modified_base 2: mod_base = OTHER; note = 2'-fluoro guanosine phosphorothioate
  modified_base 3: mod_base = OTHER; note = 2'-O-methyl adenosine
  modified_base 4: mod_base = OTHER; note = 2'-fluoro cytosine
  modified_base 5: mod_base = OTHER; note = 2'-fluoro adenosine
  modified_base 6: mod_base = OTHER; note = 2'-fluoro guanosine
  modified_base 7: mod_base = OTHER; note = 2'-O-methyl guanosine
  modified_base 8: mod_base = OTHER; note = 2'-fluoro guanosine
  modified_base 9: mod_base = OTHER; note = 2'-O-methyl adenosine
  modified_base 10: mod_base = OTHER; note = 2'-fluoro guanosine
  modified_base 11: mod_base = OTHER; note = 2'-O-methyl cytosine
  modified_base 12: mod_base = OTHER; note = 2'-fluoro uridine
  modified_base 13: mod_base = OTHER; note = 2'-O-methyl guanosine
  modified_base 14: mod_base = OTHER; note = 2'-fluoro cytosine phosphorothioate
  modified_base 15: mod_base = OTHER; note = 2'-O-methyl adenosine phosphorothioate
  modified_base 16: mod_base = OTHER; note = 2'-fluoro guanosine phosphorothioate
  modified_base 17: mod_base = OTHER; note = 2'-O-methyl cytosine phosphorothioate
  modified_base 18: mod_base = OTHER; note = 2'-O-methyl guanosine phosphorothioate
  modified_base 19: mod_base = OTHER; note = 2'-O-methyl guanosine phosphorothioate
  modified_base 20: mod_base = OTHER; note = 2'-fluoro guanosine phosphorothioate
  modified_base 21: mod_base = OTHER; note = 2'-O-methyl uridine
tgacagggagctgcagcgggt

SEQ ID NO: 834 - RNA, 21 nt, synthetic construct
  source 1..21: mol_type = other RNA
  modified_base 1: mod_base = OTHER; note = 5' phosphate 2'-O-methyl uridine phosphorothioate
  modified_base 2: mod_base = OTHER; note = 2'-fluoro guanosine phosphorothioate
  modified_base 3: mod_base = OTHER; note = 2'-O-methyl adenosine
  modified_base 4: mod_base = OTHER; note = 2'-fluoro cytosine
  modified_base 5: mod_base = OTHER; note = 2'-fluoro cytosine
  modified_base 6: mod_base = OTHER; note = 2'-fluoro cytosine
  modified_base 7: mod_base = OTHER; note = 2'-O-methyl guanosine
  modified_base 8: mod_base = OTHER; note = 2'-fluoro cytosine
  modified_base 9: mod_base = OTHER; note = 2'-O-methyl cytosine
  modified_base 10: mod_base = OTHER; note = 2'-fluoro guanosine
  modified_base 11: mod_base = OTHER; note = 2'-O-methyl guanosine
  modified_base 12: mod_base = OTHER; note = 2'-fluoro guanosine
  modified_base 13: mod_base = OTHER; note = 2'-O-methyl adenosine
  modified_base 14: mod_base = OTHER; note = 2'-fluoro cytosine phosphorothioate
  modified_base 15: mod_base = OTHER; note = 2'-O-methyl adenosine phosphorothioate
  modified_base 16: mod_base = OTHER; note = 2'-fluoro guanosine phosphorothioate
  modified_base 17: mod_base = OTHER; note = 2'-O-methyl guanosine phosphorothioate
  modified_base 18: mod_base = OTHER; note = 2'-O-methyl guanosine phosphorothioate
  modified_base 19: mod_base = OTHER; note = 2'-O-methyl adenosine phosphorothioate
  modified_base 20: mod_base = OTHER; note = 2'-fluoro guanosine phosphorothioate
  modified_base 21: mod_base = OTHER; note = 2'-O-methyl uridine
tgacccgccgggacagggagt

SEQ ID NO: 835 - RNA, 21 nt, synthetic construct
  source 1..21: mol_type = other RNA
  modified_base 1: mod_base = OTHER; note = 5' phosphate 2'-O-methyl uridine phosphorothioate
  modified_base 2: mod_base = OTHER; note = 2'-fluoro cytosine phosphorothioate
  modified_base 3: mod_base = OTHER; note = 2'-O-methyl guanosine
  modified_base 4: mod_base = OTHER; note = 2'-fluoro cytosine
  modified_base 5: mod_base = OTHER; note = 2'-fluoro cytosine
  modified_base 6: mod_base = OTHER; note = 2'-fluoro guanosine
  modified_base 7: mod_base = OTHER; note = 2'-O-methyl uridine
  modified_base 8: mod_base = OTHER; note = 2'-fluoro adenosine
  modified_base 9: mod_base = OTHER; note = 2'-O-methyl guanosine
  modified_base 10: mod_base = OTHER; note = 2'-fluoro cytosine
  modified_base 11: mod_base = OTHER; note = 2'-O-methyl cytosine
  modified_base 12: mod_base = OTHER; note = 2'-fluoro uridine
  modified_base 13: mod_base = OTHER; note = 2'-O-methyl guanosine
  modified_base 14: mod_base = OTHER; note = 2'-fluoro guanosine phosphorothioate
  modified_base 15: mod_base = OTHER; note = 2'-O-methyl guanosine phosphorothioate
  modified_base 16: mod_base = OTHER; note = 2'-fluoro adenosine phosphorothioate
  modified_base 17: mod_base = OTHER; note = 2'-O-methyl cytosine phosphorothioate
  modified_base 18: mod_base = OTHER; note = 2'-O-methyl cytosine phosphorothioate
  modified_base 19: mod_base = OTHER; note = 2'-O-methyl cytosine phosphorothioate
  modified_base 20: mod_base = OTHER; note = 2'-fluoro guanosine phosphorothioate
  modified_base 21: mod_base = OTHER; note = 2'-O-methyl uridine
tcgccgtagcctgggacccgt

SEQ ID NO: 836 - RNA, 21 nt, synthetic construct
  source 1..21: mol_type = other RNA
  modified_base 1: mod_base = OTHER; note = 5' phosphate 2'-O-methyl uridine phosphorothioate
  modified_base 2: mod_base = OTHER; note = 2'-fluoro cytosine phosphorothioate
  modified_base 3: mod_base = OTHER; note = 2'-O-methyl cytosine
  modified_base 4: mod_base = OTHER; note = 2'-fluoro cytosine
  modified_base 5: mod_base = OTHER; note = 2'-fluoro guanosine
  modified_base 6: mod_base = OTHER; note = 2'-fluoro cytosine
  modified_base 7: mod_base = OTHER; note = 2'-O-methyl cytosine
  modified_base 8: mod_base = OTHER; note = 2'-fluoro guanosine
  modified_base 9: mod_base = OTHER; note = 2'-O-methyl uridine
  modified_base 10: mod_base = OTHER; note = 2'-fluoro adenosine
  modified_base 11: mod_base = OTHER; note = 2'-O-methyl guanosine
  modified_base 12: mod_base = OTHER; note = 2'-fluoro cytosine
  modified_base 13: mod_base = OTHER; note = 2'-O-methyl cytosine
  modified_base 14: mod_base = OTHER; note = 2'-fluoro uridine phosphorothioate
  modified_base 15: mod_base = OTHER; note = 2'-O-methyl guanosine phosphorothioate
  modified_base 16: mod_base = OTHER; note = 2'-fluoro guanosine phosphorothioate
  modified_base 17: mod_base = OTHER; note = 2'-O-methyl guanosine phosphorothioate
  modified_base 18: mod_base = OTHER; note = 2'-O-methyl adenosine phosphorothioate
  modified_base 19: mod_base = OTHER; note = 2'-O-methyl cytosine phosphorothioate
  modified_base 20: mod_base = OTHER; note = 2'-fluoro cytosine phosphorothioate
  modified_base 21: mod_base = OTHER; note = 2'-O-methyl uridine
tcccgccgtagcctgggacct

SEQ ID NO: 837 - RNA, 21 nt, synthetic construct
  source 1..21: mol_type = other RNA
  modified_base 1: mod_base = OTHER; note = 5' phosphate 2'-O-methyl uridine phosphorothioate
  modified_base 2: mod_base = OTHER; note = 2'-fluoro adenosine phosphorothioate
  modified_base 3: mod_base = OTHER; note = 2'-O-methyl uridine
  modified_base 4: mod_base = OTHER; note = 2'-fluoro cytosine
  modified_base 5: mod_base = OTHER; note = 2'-fluoro cytosine
  modified_base 6: mod_base = OTHER; note = 2'-fluoro cytosine
  modified_base 7: mod_base = OTHER; note = 2'-O-methyl cytosine
  modified_base 8: mod_base = OTHER; note = 2'-fluoro guanosine
  modified_base 9: mod_base = OTHER; note = 2'-O-methyl cytosine
  modified_base 10: mod_base = OTHER; note = 2'-fluoro cytosine
  modified_base 11: mod_base = OTHER; note = 2'-O-methyl guanosine
  modified_base 12: mod_base = OTHER; note = 2'-fluoro uridine
  modified_base 13: mod_base = OTHER; note = 2'-O-methyl adenosine
  modified_base 14: mod_base = OTHER; note = 2'-fluoro guanosine phosphorothioate
  modified_base 15: mod_base = OTHER; note = 2'-O-methyl cytosine phosphorothioate
  modified_base 16: mod_base = OTHER; note = 2'-fluoro cytosine phosphorothioate
  modified_base 17: mod_base = OTHER; note = 2'-O-methyl uridine phosphorothioate
  modified_base 18: mod_base = OTHER; note = 2'-O-methyl guanosine phosphorothioate
  modified_base 19: mod_base = OTHER; note = 2'-O-methyl guanosine phosphorothioate
  modified_base 20: mod_base = OTHER; note = 2'-fluoro guanosine phosphorothioate
  modified_base 21: mod_base = OTHER; note = 2'-O-methyl uridine
tatccccgccgtagcctgggt

SEQ ID NO: 838 - RNA, 21 nt, synthetic construct
  source 1..21: mol_type = other RNA
  modified_base 1: mod_base = OTHER; note = 5' phosphate 2'-O-methyl uridine phosphorothioate
  modified_base 2: mod_base = OTHER; note = 2'-fluoro cytosine phosphorothioate
  modified_base 3: mod_base = OTHER; note = 2'-O-methyl adenosine
  modified_base 4: mod_base = OTHER; note = 2'-fluoro uridine
  modified_base 5: mod_base = OTHER; note = 2'-fluoro cytosine
  modified_base 6: mod_base = OTHER; note = 2'-fluoro cytosine
  modified_base 7: mod_base = OTHER; note = 2'-O-methyl cytosine
  modified_base 8: mod_base = OTHER; note = 2'-fluoro cytosine
  modified_base 9: mod_base = OTHER; note = 2'-O-methyl guanosine
  modified_base 10: mod_base = OTHER; note = 2'-fluoro cytosine
  modified_base 11: mod_base = OTHER; note = 2'-O-methyl cytosine
  modified_base 12: mod_base = OTHER; note = 2'-fluoro guanosine
  modified_base 13: mod_base = OTHER; note = 2'-O-methyl uridine
  modified_base 14: mod_base = OTHER; note = 2'-fluoro adenosine phosphorothioate
  modified_base 15: mod_base = OTHER; note = 2'-O-methyl guanosine phosphorothioate
  modified_base 16: mod_base = OTHER; note = 2'-fluoro cytosine phosphorothioate
  modified_base 17: mod_base = OTHER; note = 2'-O-methyl cytosine phosphorothioate
  modified_base 18: mod_base = OTHER; note = 2'-O-methyl uridine phosphorothioate
  modified_base 19: mod_base = OTHER; note = 2'-O-methyl guanosine phosphorothioate
  modified_base 20: mod_base = OTHER; note = 2'-fluoro guanosine phosphorothioate
  modified_base 21: mod_base = OTHER; note = 2'-O-methyl uridine
tcatccccgccgtagcctggt

SEQ ID NO: 839 - RNA, 21 nt, synthetic construct
  source 1..21: mol_type = other RNA
  modified_base 1: mod_base = OTHER; note = 5' phosphate 2'-O-methyl uridine phosphorothioate
  modified_base 2: mod_base = OTHER; note = 2'-fluoro uridine phosphorothioate
  modified_base 3: mod_base = OTHER; note = 2'-O-methyl adenosine
  modified_base 4: mod_base = OTHER; note = 2'-fluoro cytosine
  modified_base 5: mod_base = OTHER; note = 2'-fluoro cytosine
  modified_base 6: mod_base = OTHER; note = 2'-fluoro guanosine
  modified_base 7: mod_base = OTHER; note = 2'-O-methyl cytosine
  modified_base 8: mod_base = OTHER; note = 2'-fluoro cytosine
  modified_base 9: mod_base = OTHER; note = 2'-O-methyl adenosine
  modified_base 10: mod_base = OTHER; note = 2'-fluoro uridine
  modified_base 11: mod_base = OTHER; note = 2'-O-methyl cytosine
  modified_base 12: mod_base = OTHER; note = 2'-fluoro cytosine
  modified_base 13: mod_base = OTHER; note = 2'-O-methyl cytosine
  modified_base 14: mod_base = OTHER; note = 2'-fluoro cytosine phosphorothioate
  modified_base 15: mod_base = OTHER; note = 2'-O-methyl guanosine phosphorothioate
  modified_base 16: mod_base = OTHER; note = 2'-fluoro cytosine phosphorothioate
  modified_base 17: mod_base = OTHER; note = 2'-O-methyl cytosine phosphorothioate
  modified_base 18: mod_base = OTHER; note = 2'-O-methyl guanosine phosphorothioate
  modified_base 19: mod_base = OTHER; note = 2'-O-methyl uridine phosphorothioate
  modified_base 20: mod_base = OTHER; note = 2'-fluoro adenosine phosphorothioate
  modified_base 21: mod_base = OTHER; note = 2'-O-methyl uridine
ttaccgccatccccgccgtat

SEQ ID NO: 840 - RNA, 21 nt, synthetic construct
  source 1..21: mol_type = other RNA
  modified_base 1: mod_base = OTHER; note = 5' phosphate 2'-O-methyl uridine phosphorothioate
  modified_base 2: mod_base = OTHER; note = 2'-fluoro uridine phosphorothioate
  modified_base 3: mod_base = OTHER; note = 2'-O-methyl uridine
  modified_base 4: mod_base = OTHER; note = 2'-fluoro adenosine
  modified_base 5: mod_base = OTHER; note = 2'-fluoro cytosine
  modified_base 6: mod_base = OTHER; note = 2'-fluoro cytosine
  modified_base 7: mod_base = OTHER; note = 2'-O-methyl guanosine
  modified_base 8: mod_base = OTHER; note = 2'-fluoro cytosine
  modified_base 9: mod_base = OTHER; note = 2'-O-methyl cytosine
  modified_base 10: mod_base = OTHER; note = 2'-fluoro adenosine
  modified_base 11: mod_base = OTHER; note = 2'-O-methyl uridine
  modified_base 12: mod_base = OTHER; note = 2'-fluoro cytosine
  modified_base 13: mod_base = OTHER; note = 2'-O-methyl cytosine
  modified_base 14: mod_base = OTHER; note = 2'-fluoro cytosine phosphorothioate
  modified_base 15: mod_base = OTHER; note = 2'-O-methyl cytosine phosphorothioate
  modified_base 16: mod_base = OTHER; note = 2'-fluoro guanosine phosphorothioate
  modified_base 17: mod_base = OTHER; note = 2'-O-methyl cytosine phosphorothioate
  modified_base 18: mod_base = OTHER; note = 2'-O-methyl cytosine phosphorothioate
  modified_base 19: mod_base = OTHER; note = 2'-O-methyl guanosine phosphorothioate
  modified_base 20: mod_base = OTHER; note = 2'-fluoro uridine phosphorothioate
  modified_base 21: mod_base = OTHER; note = 2'-O-methyl uridine
tttaccgccatccccgccgtt

SEQ ID NO: 841 - RNA, 21 nt, synthetic construct
  source 1..21: mol_type = other RNA
  modified_base 1: mod_base = OTHER; note = 5' phosphate 2'-O-methyl uridine phosphorothioate
  modified_base 2: mod_base = OTHER; note = 2'-fluoro cytosine phosphorothioate
  modified_base 3: mod_base = OTHER; note = 2'-O-methyl adenosine
  modified_base 4: mod_base = OTHER; note = 2'-fluoro guanosine
  modified_base 5: mod_base = OTHER; note = 2'-fluoro guanosine
  modified_base 6: mod_base = OTHER; note = 2'-fluoro guanosine
  modified_base 7: mod_base = OTHER; note = 2'-O-methyl uridine
  modified_base 8: mod_base = OTHER; note = 2'-fluoro uridine
  modified_base 9: mod_base = OTHER; note = 2'-O-methyl adenosine
  modified_base 10: mod_base = OTHER; note = 2'-fluoro cytosine
  modified_base 11: mod_base = OTHER; note = 2'-O-methyl cytosine
  modified_base 12: mod_base = OTHER; note = 2'-fluoro guanosine
  modified_base 13: mod_base = OTHER; note = 2'-O-methyl cytosine
  modified_base 14: mod_base = OTHER; note = 2'-fluoro cytosine phosphorothioate
  modified_base 15: mod_base = OTHER; note = 2'-O-methyl adenosine phosphorothioate
  modified_base 16: mod_base = OTHER; note = 2'-fluoro uridine phosphorothioate
  modified_base 17: mod_base = OTHER; note = 2'-O-methyl cytosine phosphorothioate
  modified_base 18: mod_base = OTHER; note = 2'-O-methyl cytosine phosphorothioate
  modified_base 19: mod_base = OTHER; note = 2'-O-methyl cytosine phosphorothioate
  modified_base 20: mod_base = OTHER; note = 2'-fluoro cytosine phosphorothioate
  modified_base 21: mod_base = OTHER; note = 2'-O-methyl uridine
tcagggttaccgccatcccct

SEQ ID NO: 842 - RNA, 21 nt, synthetic construct
  source 1..21: mol_type = other RNA
  modified_base 1: mod_base = OTHER; note = 5' phosphate 2'-O-methyl uridine phosphorothioate
  modified_base 2: mod_base = OTHER; note = 2'-fluoro cytosine phosphorothioate
  modified_base 3: mod_base = OTHER; note = 2'-O-methyl uridine
  modified_base 4: mod_base = OTHER; note = 2'-fluoro guanosine
  modified_base 5: mod_base = OTHER; note = 2'-fluoro cytosine
  modified_base 6: mod_base = OTHER; note = 2'-fluoro adenosine
  modified_base 7: mod_base = OTHER; note = 2'-O-methyl guanosine
  modified_base 8: mod_base = OTHER; note = 2'-fluoro guanosine
  modified_base 9: mod_base = OTHER; note = 2'-O-methyl guanosine
  modified_base 10: mod_base = OTHER; note = 2'-fluoro uridine
  modified_base 11: mod_base = OTHER; note = 2'-O-methyl uridine
  modified_base 12: mod_base = OTHER; note = 2'-fluoro adenosine
  modified_base 13: mod_base = OTHER; note = 2'-O-methyl cytosine
  modified_base 14: mod_base = OTHER; note = 2'-fluoro cytosine phosphorothioate
  modified_base 15: mod_base = OTHER; note = 2'-O-methyl guanosine phosphorothioate
  modified_base 16: mod_base = OTHER; note = 2'-fluoro cytosine phosphorothioate
  modified_base 17: mod_base = OTHER; note = 2'-O-methyl cytosine phosphorothioate
  modified_base 18: mod_base = OTHER; note = 2'-O-methyl adenosine phosphorothioate
  modified_base 19: mod_base = OTHER; note = 2'-O-methyl uridine phosphorothioate
  modified_base 20: mod_base = OTHER; note = 2'-fluoro cytosine phosphorothioate
  modified_base 21: mod_base = OTHER; note = 2'-O-methyl uridine
tctgcagggttaccgccatct

SEQ ID NO: 843 - RNA, 21 nt, synthetic construct
  source 1..21: mol_type = other RNA
  modified_base 1: mod_base = OTHER; note = 5' phosphate 2'-O-methyl uridine phosphorothioate
  modified_base 2: mod_base = OTHER; note = 2'-fluoro adenosine phosphorothioate
  modified_base 3: mod_base = OTHER; note = 2'-O-methyl guanosine
  modified_base 4: mod_base = OTHER; note = 2'-fluoro guanosine
  modified_base 5: mod_base = OTHER; note = 2'-fluoro cytosine
  modified_base 6: mod_base = OTHER; note = 2'-fluoro uridine
  modified_base 7: mod_base = OTHER; note = 2'-O-methyl guanosine
  modified_base 8: mod_base = OTHER; note = 2'-fluoro cytosine
  modified_base 9: mod_base = OTHER; note = 2'-O-methyl adenosine
  modified_base 10: mod_base = OTHER; note = 2'-fluoro guanosine
  modified_base 11: mod_base = OTHER; note = 2'-O-methyl guanosine
  modified_base 12: mod_base = OTHER; note = 2'-fluoro guanosine
  modified_base 13: mod_base = OTHER; note = 2'-O-methyl uridine
  modified_base 14: mod_base = OTHER; note = 2'-fluoro uridine phosphorothioate
  modified_base 15: mod_base = OTHER; note = 2'-O-methyl adenosine phosphorothioate
  modified_base 16: mod_base = OTHER; note = 2'-fluoro cytosine phosphorothioate
  modified_base 17: mod_base = OTHER; note = 2'-O-methyl cytosine phosphorothioate
  modified_base 18: mod_base = OTHER; note = 2'-O-methyl guanosine phosphorothioate
  modified_base 19: mod_base = OTHER; note = 2'-O-methyl cytosine phosphorothioate
  modified_base 20: mod_base = OTHER; note = 2'-fluoro cytosine phosphorothioate
  modified_base 21: mod_base = OTHER; note = 2'-O-methyl uridine
taggctgcagggttaccgcct

SEQ ID NO: 844 - RNA, 21 nt, synthetic construct
  source 1..21: mol_type = other RNA
  modified_base 1: mod_base = OTHER; note = 5' phosphate 2'-O-methyl uridine phosphorothioate
  modified_base 2: mod_base = OTHER; note = 2'-fluoro cytosine phosphorothioate
  modified_base 3: mod_base = OTHER; note = 2'-O-methyl adenosine
  modified_base 4: mod_base = OTHER; note = 2'-fluoro guanosine
  modified_base 5: mod_base = OTHER; note = 2'-fluoro guanosine
  modified_base 6: mod_base = OTHER; note = 2'-fluoro cytosine
  modified_base 7: mod_base = OTHER; note = 2'-O-methyl uridine
  modified_base 8: mod_base = OTHER; note = 2'-fluoro guanosine
  modified_base 9: mod_base = OTHER; note = 2'-O-methyl cytosine
  modified_base 10: mod_base = OTHER; note = 2'-fluoro adenosine
  modified_base 11: mod_base = OTHER; note = 2'-O-methyl guanosine
  modified_base 12: mod_base = OTHER; note = 2'-fluoro guanosine
  modified_base 13: mod_base = OTHER; note = 2'-O-methyl guanosine
  modified_base 14: mod_base = OTHER; note = 2'-fluoro uridine phosphorothioate
  modified_base 15: mod_base = OTHER; note = 2'-O-methyl uridine phosphorothioate
  modified_base 16: mod_base = OTHER; note = 2'-fluoro adenosine phosphorothioate
  modified_base 17: mod_base = OTHER; note = 2'-O-methyl cytosine phosphorothioate
  modified_base 18: mod_base = OTHER; note = 2'-O-methyl cytosine phosphorothioate
  modified_base 19: mod_base = OTHER; note = 2'-O-methyl guanosine phosphorothioate
  modified_base 20: mod_base = OTHER; note = 2'-fluoro cytosine phosphorothioate
  modified_base 21: mod_base = OTHER; note = 2'-O-methyl uridine
tcaggctgcagggttaccgct

SEQ ID NO: 845 - RNA, 21 nt, synthetic construct
  source 1..21: mol_type = other RNA
  modified_base 1: mod_base = OTHER; note = 5' phosphate 2'-O-methyl uridine phosphorothioate
  modified_base 2: mod_base = OTHER; note = 2'-fluoro cytosine phosphorothioate
  modified_base 3: mod_base = OTHER; note = 2'-O-methyl guanosine
  modified_base 4: mod_base = OTHER; note = 2'-fluoro cytosine
  modified_base 5: mod_base = OTHER; note = 2'-fluoro adenosine
  modified_base 6: mod_base = OTHER; note = 2'-fluoro guanosine
  modified_base 7: mod_base = OTHER; note = 2'-O-methyl guanosine
  modified_base 8: mod_base = OTHER; note = 2'-fluoro cytosine
  modified_base 9: mod_base = OTHER; note = 2'-O-methyl uridine
  modified_base 10: mod_base = OTHER; note = 2'-fluoro guanosine
  modified_base 11: mod_base = OTHER; note = 2'-O-methyl cytosine
  modified_base 12: mod_base = OTHER; note = 2'-fluoro adenosine
  modified_base 13: mod_base = OTHER; note = 2'-O-methyl guanosine
  modified_base 14: mod_base = OTHER; note = 2'-fluoro guanosine phosphorothioate
  modified_base 15: mod_base = OTHER; note = 2'-O-methyl guanosine phosphorothioate
  modified_base 16: mod_base = OTHER; note = 2'-fluoro uridine phosphorothioate
  modified_base 17: mod_base = OTHER; note = 2'-O-methyl uridine phosphorothioate
  modified_base 18: mod_base = OTHER; note = 2'-O-methyl adenosine phosphorothioate
  modified_base 19: mod_base = OTHER; note = 2'-O-methyl cytosine phosphorothioate
  modified_base 20: mod_base = OTHER; note = 2'-fluoro cytosine phosphorothioate
  modified_base 21: mod_base = OTHER; note = 2'-O-methyl uridine
tcgcaggctgcagggttacct

SEQ ID NO: 846 - RNA, 21 nt, synthetic construct
  source 1..21: mol_type = other RNA
  modified_base 1: mod_base = OTHER; note = 5' phosphate 2'-O-methyl uridine phosphorothioate
  modified_base 2: mod_base = OTHER; note = 2'-fluoro guanosine phosphorothioate
  modified_base 3: mod_base = OTHER; note = 2'-O-methyl guanosine
  modified_base 4: mod_base = OTHER; note = 2'-fluoro uridine
  modified_base 5: mod_base = OTHER; note = 2'-fluoro uridine
  modified_base 6: mod_base = OTHER; note = 2'-fluoro cytosine
  modified_base 7: mod_base = OTHER; note = 2'-O-methyl guanosine
  modified_base 8: mod_base = OTHER; note = 2'-fluoro uridine
  modified_base 9: mod_base = OTHER; note = 2'-O-methyl guanosine
  modified_base 10: mod_base = OTHER; note = 2'-fluoro uridine
  modified_base 11: mod_base = OTHER; note = 2'-O-methyl cytosine
  modified_base 12: mod_base = OTHER; note = 2'-fluoro guanosine
  modified_base 13: mod_base = OTHER; note = 2'-O-methyl cytosine
  modified_base 14: mod_base = OTHER; note = 2'-fluoro cytosine phosphorothioate
  modified_base 15: mod_base = OTHER; note = 2'-O-methyl guanosine phosphorothioate
  modified_base 16: mod_base = OTHER; note = 2'-fluoro guanosine phosphorothioate
  modified_base 17: mod_base = OTHER; note = 2'-O-methyl cytosine phosphorothioate
  modified_base 18: mod_base = OTHER; note = 2'-O-methyl cytosine phosphorothioate
  modified_base 19: mod_base = OTHER; note = 2'-O-methyl cytosine phosphorothioate
  modified_base 20: mod_base = OTHER; note = 2'-fluoro guanosine phosphorothioate
  modified_base 21: mod_base = OTHER; note = 2'-O-methyl uridine
tggttcgtgtcgccggcccgt

SEQ ID NO: 847 - RNA, 21 nt, synthetic construct
  source 1..21: mol_type = other RNA
  modified_base 1: mod_base = OTHER; note = 5' phosphate 2'-O-methyl uridine phosphorothioate
  modified_base 2: mod_base = OTHER; note = 2'-fluoro uridine phosphorothioate
  modified_base 3: mod_base = OTHER; note = 2'-O-methyl cytosine
  modified_base 4: mod_base = OTHER; note = 2'-fluoro adenosine
  modified_base 5: mod_base = OTHER; note = 2'-fluoro cytosine
  modified_base 6: mod_base = OTHER; note = 2'-fluoro uridine
  modified_base 7: mod_base = OTHER; note = 2'-O-methyl cytosine
  modified_base 8: mod_base = OTHER; note = 2'-fluoro uridine
  modified_base 9: mod_base = OTHER; note = 2'-O-methyl guanosine
  modified_base 10: mod_base = OTHER; note = 2'-fluoro uridine
  modified_base 11: mod_base = OTHER; note = 2'-O-methyl cytosine
  modified_base 12: mod_base = OTHER; note = 2'-fluoro uridine
  modified_base 13: mod_base = OTHER; note = 2'-O-methyl cytosine
  modified_base 14: mod_base = OTHER; note = 2'-fluoro uridine phosphorothioate
  modified_base 15: mod_base = OTHER; note = 2'-O-methyl guanosine phosphorothioate
  modified_base 16: mod_base = OTHER; note = 2'-fluoro cytosine phosphorothioate
  modified_base 17: mod_base = OTHER; note = 2'-O-methyl guanosine phosphorothioate
  modified_base 18: mod_base = OTHER; note = 2'-O-methyl guanosine phosphorothioate
  modified_base 19: mod_base = OTHER; note = 2'-O-methyl guanosine phosphorothioate
  modified_base 20: mod_base = OTHER; note = 2'-fluoro guanosine phosphorothioate
  modified_base 21: mod_base = OTHER; note = 2'-O-methyl uridine
ttcactctgtctctgcggggt

SEQ ID NO: 848 - RNA, 21 nt, synthetic construct
  source 1..21: mol_type = other RNA
  modified_base 1: mod_base = OTHER; note = 5' phosphate 2'-O-methyl uridine phosphorothioate
  modified_base 2: mod_base = OTHER; note = 2'-fluoro guanosine phosphorothioate
  modified_base 3: mod_base = OTHER; note = 2'-O-methyl guanosine
  modified_base 4: mod_base = OTHER; note = 2'-fluoro guanosine
  modified_base 5: mod_base = OTHER; note = 2'-fluoro uridine
  modified_base 6: mod_base = OTHER; note = 2'-fluoro cytosine
  modified_base 7: mod_base = OTHER; note = 2'-O-methyl adenosine
  modified_base 8: mod_base = OTHER; note = 2'-fluoro cytosine
  modified_base 9: mod_base = OTHER; note = 2'-O-methyl uridine
  modified_base 10: mod_base = OTHER; note = 2'-fluoro cytosine
  modified_base 11: mod_base = OTHER; note = 2'-O-methyl uridine
  modified_base 12: mod_base = OTHER; note = 2'-fluoro guanosine
  modified_base 13: mod_base = OTHER; note = 2'-O-methyl uridine
  modified_base 14: mod_base = OTHER; note = 2'-fluoro cytosine phosphorothioate
  modified_base 15: mod_base = OTHER; note = 2'-O-methyl uridine phosphorothioate
  modified_base 16: mod_base = OTHER; note = 2'-fluoro cytosine phosphorothioate
  modified_base 17: mod_base = OTHER; note = 2'-O-methyl uridine phosphorothioate
  modified_base 18: mod_base = OTHER; note = 2'-O-methyl guanosine phosphorothioate
  modified_base 19: mod_base = OTHER; note = 2'-O-methyl cytosine phosphorothioate
  modified_base 20: mod_base = OTHER; note = 2'-fluoro guanosine phosphorothioate
  modified_base 21: mod_base = OTHER; note = 2'-O-methyl uridine
tgggtcactctgtctctgcgt

SEQ ID NO: 849 - RNA, 21 nt, synthetic construct
  source 1..21: mol_type = other RNA
  modified_base 1: mod_base = OTHER; note = 5' phosphate 2'-O-methyl uridine phosphorothioate
  modified_base 2: mod_base = OTHER; note = 2'-fluoro uridine phosphorothioate
  modified_base 3: mod_base = OTHER; note = 2'-O-methyl uridine
  modified_base 4: mod_base = OTHER; note = 2'-fluoro guanosine
  modified_base 5: mod_base = OTHER; note = 2'-fluoro cytosine
  modified_base 6: mod_base = OTHER; note = 2'-fluoro uridine
  modified_base 7: mod_base = OTHER; note = 2'-O-methyl guanosine
  modified_base 8: mod_base = OTHER; note = 2'-fluoro guanosine
  modified_base 9: mod_base = OTHER; note = 2'-O-methyl guanosine
  modified_base 10: mod_base = OTHER; note = 2'-fluoro uridine
  modified_base 11: mod_base = OTHER; note = 2'-O-methyl cytosine
  modified_base 12: mod_base = OTHER; note = 2'-fluoro adenosine
  modified_base 13: mod_base = OTHER; note = 2'-O-methyl cytosine
  modified_base 14: mod_base = OTHER; note = 2'-fluoro uridine phosphorothioate
  modified_base 15: mod_base = OTHER; note = 2'-O-methyl cytosine phosphorothioate
  modified_base 16: mod_base = OTHER; note = 2'-fluoro uridine phosphorothioate
  modified_base 17: mod_base = OTHER; note = 2'-O-methyl guanosine phosphorothioate
  modified_base 18: mod_base = OTHER; note = 2'-O-methyl uridine phosphorothioate
  modified_base 19: mod_base = OTHER; note = 2'-O-methyl cytosine phosphorothioate
  modified_base 20: mod_base = OTHER; note = 2'-fluoro uridine phosphorothioate
  modified_base 21: mod_base = OTHER; note = 2'-O-methyl uridine
tttgctgggtcactctgtctt

SEQ ID NO: 850 - RNA, 21 nt, synthetic construct
  source 1..21: mol_type = other RNA
  modified_base 1: mod_base = OTHER; note = 5' phosphate 2'-O-methyl uridine phosphorothioate
  modified_base 2: mod_base = OTHER; note = 2'-fluoro cytosine phosphorothioate
  modified_base 3: mod_base = OTHER; note = 2'-O-methyl cytosine
  modified_base 4: mod_base = OTHER; note = 2'-fluoro uridine
  modified_base 5: mod_base = OTHER; note = 2'-fluoro cytosine
  modified_base 6: mod_base = OTHER; note = 2'-fluoro adenosine
  modified_base 7: mod_base = OTHER; note = 2'-O-methyl uridine
  modified_base 8: mod_base = OTHER; note = 2'-fluoro guanosine
  modified_base 9: mod_base = OTHER; note = 2'-O-methyl guanosine
  modified_base 10: mod_base = OTHER; note = 2'-fluoro guanosine
  modified_base 11: mod_base = OTHER; note = 2'-O-methyl cytosine
  modified_base 12: mod_base = OTHER; note = 2'-fluoro uridine
  modified_base 13: mod_base = OTHER; note = 2'-O-methyl cytosine
  modified_base 14: mod_base = OTHER; note = 2'-fluoro uridine phosphorothioate
  modified_base 15: mod_base = OTHER; note = 2'-O-methyl guanosine phosphorothioate
  modified_base 16: mod_base = OTHER; note = 2'-fluoro guanosine phosphorothioate
  modified_base 17: mod_base = OTHER; note = 2'-O-methyl guanosine phosphorothioate
  modified_base 18: mod_base = OTHER; note = 2'-O-methyl uridine phosphorothioate
  modified_base 19: mod_base = OTHER; note = 2'-O-methyl uridine phosphorothioate
  modified_base 20: mod_base = OTHER; note = 2'-fluoro guanosine phosphorothioate
  modified_base 21: mod_base = OTHER; note = 2'-O-methyl uridine
tcctcatgggctctgggttgt

SEQ ID NO: 851 - RNA, 21 nt, synthetic construct
  source 1..21: mol_type = other RNA
  modified_base 1: mod_base = OTHER; note = 5' phosphate 2'-O-methyl uridine phosphorothioate
  modified_base 2: mod_base = OTHER; note = 2'-fluoro guanosine phosphorothioate
  modified_base 3: mod_base = OTHER; note = 2'-O-methyl guanosine
  modified_base 4: mod_base = OTHER; note = 2'-fluoro guanosine
  modified_base 5: mod_base = OTHER; note = 2'-fluoro uridine
  modified_base 6: mod_base = OTHER; note = 2'-fluoro guanosine
  modified_base 7: mod_base = OTHER; note = 2'-O-methyl uridine
  modified_base 8: mod_base = OTHER; note = 2'-fluoro cytosine
  modified_base 9: mod_base = OTHER; note = 2'-O-methyl cytosine
  modified_base 10: mod_base = OTHER; note = 2'-fluoro cytosine
  modified_base 11: mod_base = OTHER; note = 2'-O-methyl uridine
  modified_base 12: mod_base = OTHER; note = 2'-fluoro cytosine
  modified_base 13: mod_base = OTHER; note = 2'-O-methyl adenosine
  modified_base 14: mod_base = OTHER; note = 2'-fluoro uridine phosphorothioate
  modified_base 15: mod_base = OTHER; note = 2'-O-methyl guanosine phosphorothioate
  modified_base 16: mod_base = OTHER; note = 2'-fluoro guanosine phosphorothioate
  modified_base 17: mod_base = OTHER; note = 2'-O-methyl guanosine phosphorothioate
  modified_base 18: mod_base = OTHER; note = 2'-O-methyl cytosine phosphorothioate
  modified_base 19: mod_base = OTHER; note = 2'-O-methyl uridine phosphorothioate
  modified_base 20: mod_base = OTHER; note = 2'-fluoro cytosine phosphorothioate
  modified_base 21: mod_base = OTHER; note = 2'-O-methyl uridine
tgggtgtccctcatgggctct

SEQ ID NO: 852 - RNA, 21 nt, synthetic construct
  source 1..21: mol_type = other RNA
  modified_base 1: mod_base = OTHER; note = 5' phosphate 2'-O-methyl uridine phosphorothioate
  modified_base 2: mod_base = OTHER; note = 2'-fluoro adenosine phosphorothioate
  modified_base 3: mod_base = OTHER; note = 2'-O-methyl guanosine
  modified_base 4: mod_base = OTHER; note = 2'-fluoro uridine
  modified_base 5: mod_base = OTHER; note = 2'-fluoro guanosine
  modified_base 6: mod_base = OTHER; note = 2'-fluoro adenosine
  modified_base 7: mod_base = OTHER; note = 2'-O-methyl guanosine
  modified_base 8: mod_base = OTHER; note = 2'-fluoro guanosine
  modified_base 9: mod_base = OTHER; note = 2'-O-methyl guanosine
  modified_base 10: mod_base = OTHER; note = 2'-fluoro adenosine
  modified_base 11: mod_base = OTHER; note = 2'-O-methyl guanosine
  modified_base 12: mod_base = OTHER; note = 2'-fluoro cytosine
  modified_base 13: mod_base = OTHER; note = 2'-O-methyl guanosine
  modified_base 14: mod_base = OTHER; note = 2'-fluoro guanosine phosphorothioate
  modified_base 15: mod_base = OTHER; note = 2'-O-methyl guanosine phosphorothioate
  modified_base 16: mod_base = OTHER; note = 2'-fluoro guanosine phosphorothioate
  modified_base 17: mod_base = OTHER; note = 2'-O-methyl cytosine phosphorothioate
  modified_base 18: mod_base = OTHER; note = 2'-O-methyl uridine phosphorothioate
  modified_base 19: mod_base = OTHER; note = 2'-O-methyl guanosine phosphorothioate
  modified_base 20: mod_base = OTHER; note = 2'-fluoro adenosine phosphorothioate
  modified_base 21: mod_base = OTHER; note = 2'-O-methyl uridine
tagtgagggagcggggctgat

SEQ ID NO: 853 - RNA, 21 nt, synthetic construct
  source 1..21: mol_type = other RNA
  modified_base 1: mod_base = OTHER; note = 5' phosphate 2'-O-methyl uridine phosphorothioate
  modified_base 2: mod_base = OTHER; note = 2'-fluoro adenosine phosphorothioate
  modified_base 3: mod_base = OTHER; note = 2'-O-methyl adenosine
  modified_base 4: mod_base = OTHER; note = 2'-fluoro guanosine
  modified_base 5: mod_base = OTHER; note = 2'-fluoro uridine
  modified_base 6: mod_base = OTHER; note = 2'-fluoro guanosine
  modified_base 7: mod_base = OTHER; note = 2'-O-methyl adenosine
  modified_base 8: mod_base = OTHER; note = 2'-fluoro guanosine
  modified_base 9: mod_base = OTHER; note = 2'-O-methyl guanosine
  modified_base 10: mod_base = OTHER; note = 2'-fluoro guanosine
  modified_base 11: mod_base = OTHER; note = 2'-O-methyl adenosine
  modified_base 12: mod_base = OTHER; note = 2'-fluoro guanosine
  modified_base 13: mod_base = OTHER; note = 2'-O-methyl cytosine
  modified_base 14: mod_base = OTHER; note = 2'-fluoro guanosine phosphorothioate
  modified_base 15: mod_base = OTHER; note = 2'-O-methyl guanosine phosphorothioate
  modified_base 16: mod_base = OTHER; note = 2'-fluoro guanosine phosphorothioate
  modified_base 17: mod_base = OTHER; note = 2'-O-methyl guanosine phosphorothioate
  modified_base 18: mod_base = OTHER; note = 2'-O-methyl cytosine phosphorothioate
  modified_base 19: mod_base = OTHER; note = 2'-O-methyl uridine phosphorothioate
  modified_base 20: mod_base = OTHER; note = 2'-fluoro guanosine phosphorothioate
  modified_base 21: mod_base = OTHER; note = 2'-O-methyl uridine
taagtgagggagcggggctgt

SEQ ID NO: 854 - RNA, 21 nt, synthetic construct
  source 1..21: mol_type = other RNA
  modified_base 1: mod_base = OTHER; note = 5' phosphate 2'-O-methyl uridine phosphorothioate
  modified_base 2: mod_base = OTHER; note = 2'-fluoro cytosine phosphorothioate
  modified_base 3: mod_base = OTHER; note = 2'-O-methyl adenosine
  modified_base 4: mod_base = OTHER; note = 2'-fluoro adenosine
  modified_base 5: mod_base = OTHER; note = 2'-fluoro guanosine
  modified_base 6: mod_base = OTHER; note = 2'-fluoro uridine
  modified_base 7: mod_base = OTHER; note = 2'-O-methyl guanosine
  modified_base 8: mod_base = OTHER; note = 2'-fluoro adenosine
  modified_base 9: mod_base = OTHER; note = 2'-O-methyl guanosine
  modified_base 10: mod_base = OTHER; note = 2'-fluoro guanosine
  modified_base 11: mod_base = OTHER; note = 2'-O-methyl guanosine
  modified_base 12: mod_base = OTHER; note = 2'-fluoro adenosine
  modified_base 13: mod_base = OTHER; note = 2'-O-methyl guanosine
  modified_base 14: mod_base = OTHER; note = 2'-fluoro cytosine phosphorothioate
  modified_base 15: mod_base = OTHER; note = 2'-O-methyl guanosine phosphorothioate
  modified_base 16: mod_base = OTHER; note = 2'-fluoro guanosine phosphorothioate
  modified_base 17: mod_base = OTHER; note = 2'-O-methyl guanosine phosphorothioate
  modified_base 18: mod_base = OTHER; note = 2'-O-methyl guanosine phosphorothioate
  modified_base 19: mod_base = OTHER; note = 2'-O-methyl cytosine phosphorothioate
  modified_base 20: mod_base = OTHER; note = 2'-fluoro uridine phosphorothioate
  modified_base 21: mod_base = OTHER; note = 2'-O-methyl uridine
tcaagtgagggagcggggctt

SEQ ID NO: 855 - RNA, 21 nt, synthetic construct
  source 1..21: mol_type = other RNA
  modified_base 1: mod_base = OTHER; note = 5' phosphate 2'-O-methyl uridine phosphorothioate
  modified_base 2: mod_base = OTHER; note = 2'-fluoro cytosine phosphorothioate
  modified_base 3: mod_base = OTHER; note = 2'-O-methyl cytosine
  modified_base 4: mod_base = OTHER; note = 2'-fluoro adenosine
  modified_base 5: mod_base = OTHER; note = 2'-fluoro adenosine
  modified_base 6: mod_base = OTHER; note = 2'-fluoro guanosine
  modified_base 7: mod_base = OTHER; note = 2'-O-methyl uridine
  modified_base 8: mod_base = OTHER; note = 2'-fluoro guanosine
  modified_base 9: mod_base = OTHER; note = 2'-O-methyl adenosine
  modified_base 10: mod_base = OTHER; note = 2'-fluoro guanosine
  modified_base 11: mod_base = OTHER; note = 2'-O-methyl guanosine
  modified_base 12: mod_base = OTHER; note = 2'-fluoro guanosine
  modified_base 13: mod_base = OTHER; note = 2'-O-methyl adenosine
  modified_base 14: mod_base = OTHER; note = 2'-fluoro guanosine phosphorothioate
  modified_base 15: mod_base = OTHER; note = 2'-O-methyl cytosine phosphorothioate
  modified_base 16: mod_base = OTHER; note = 2'-fluoro guanosine phosphorothioate
  modified_base 17: mod_base = OTHER; note = 2'-O-methyl guanosine phosphorothioate
  modified_base 18: mod_base = OTHER; note = 2'-O-methyl guanosine phosphorothioate
  modified_base 19: mod_base = OTHER; note = 2'-O-methyl guanosine phosphorothioate
  modified_base 20: mod_base = OTHER; note = 2'-fluoro cytosine phosphorothioate
  modified_base 21: mod_base = OTHER; note = 2'-O-methyl uridine
tccaagtgagggagcggggct

SEQ ID NO: 856 - RNA, 21 nt, synthetic construct
  source 1..21: mol_type = other RNA
  modified_base 1: mod_base = OTHER; note = 5' phosphate 2'-O-methyl uridine phosphorothioate
  modified_base 2: mod_base = OTHER; note = 2'-fluoro adenosine phosphorothioate
  modified_base 3: mod_base = OTHER; note = 2'-O-methyl cytosine
  modified_base 4: mod_base = OTHER; note = 2'-fluoro cytosine
  modified_base 5: mod_base = OTHER; note = 2'-fluoro cytosine
  modified_base 6: mod_base = OTHER; note = 2'-fluoro adenosine
  modified_base 7: mod_base = OTHER; note = 2'-O-methyl adenosine
  modified_base 8: mod_base = OTHER; note = 2'-fluoro guanosine
  modified_base 9: mod_base = OTHER; note = 2'-O-methyl uridine
  modified_base 10: mod_base = OTHER; note = 2'-fluoro guanosine
  modified_base 11: mod_base = OTHER; note = 2'-O-methyl adenosine
  modified_base 12: mod_base = OTHER; note = 2'-fluoro guanosine
  modified_base 13: mod_base = OTHER; note = 2'-O-methyl guanosine
  modified_base 14: mod_base = OTHER; note = 2'-fluoro guanosine phosphorothioate
  modified_base 15: mod_base = OTHER; note = 2'-O-methyl adenosine phosphorothioate
  modified_base 16: mod_base = OTHER; note = 2'-fluoro guanosine phosphorothioate
  modified_base 17: mod_base = OTHER; note = 2'-O-methyl cytosine phosphorothioate
  modified_base 18: mod_base = OTHER; note = 2'-O-methyl guanosine phosphorothioate
  modified_base 19: mod_base = OTHER; note = 2'-O-methyl guanosine phosphorothioate
  modified_base 20: mod_base = OTHER; note = 2'-fluoro guanosine phosphorothioate
  modified_base 21: mod_base = OTHER; note = 2'-O-methyl uridine
tacccaagtgagggagcgggt

SEQ ID NO: 857 - RNA, 21 nt, synthetic construct
  source 1..21: mol_type = other RNA
  modified_base 1: mod_base = OTHER; note = 5' phosphate 2'-O-methyl uridine phosphorothioate
  modified_base 2: mod_base = OTHER; note = 2'-fluoro adenosine phosphorothioate
  modified_base 3: mod_base = OTHER; note = 2'-O-methyl guanosine
  modified_base 4: mod_base = OTHER; note = 2'-fluoro adenosine
  modified_base 5: mod_base = OTHER; note = 2'-fluoro cytosine
  modified_base 6: mod_base = OTHER; note = 2'-fluoro cytosine
  modified_base 7: mod_base = OTHER; note = 2'-O-methyl cytosine
  modified_base 8: mod_base = OTHER; note = 2'-fluoro adenosine
  modified_base 9: mod_base = OTHER; note = 2'-O-methyl adenosine
  modified_base 10: mod_base = OTHER; note = 2'-fluoro guanosine
  modified_base 11: mod_base = OTHER; note = 2'-O-methyl uridine
  modified_base 12: mod_base = OTHER; note = 2'-fluoro guanosine
  modified_base 13: mod_base = OTHER; note = 2'-O-methyl adenosine
  modified_base 14: mod_base = OTHER; note = 2'-fluoro guanosine phosphorothioate
  modified_base 15: mod_base = OTHER; note = 2'-O-methyl guanosine phosphorothioate
  modified_base 16: mod_base = OTHER; note = 2'-fluoro guanosine phosphorothioate
  modified_base 17: mod_base = OTHER; note = 2'-O-methyl adenosine phosphorothioate
  modified_base 18: mod_base = OTHER; note = 2'-O-methyl guanosine phosphorothioate
  modified_base 19: mod_base = OTHER; note = 2'-O-methyl cytosine phosphorothioate
  modified_base 20: mod_base = OTHER; note = 2'-fluoro guanosine phosphorothioate
  modified_base 21: mod_base = OTHER; note = 2'-O-methyl uridine
tagacccaagtgagggagcgt

SEQ ID NO: 858 - RNA, 21 nt, synthetic construct
  source 1..21: mol_type = other RNA
  modified_base 1: mod_base = OTHER; note = 5' phosphate 2'-O-methyl uridine phosphorothioate
  modified_base 2: mod_base = OTHER; note = 2'-fluoro adenosine phosphorothioate
  modified_base 3: mod_base = OTHER; note = 2'-O-methyl adenosine
  modified_base 4: mod_base = OTHER; note = 2'-fluoro guanosine
  modified_base 5: mod_base = OTHER; note = 2'-fluoro adenosine
  modified_base 6: mod_base = OTHER; note = 2'-fluoro cytosine
  modified_base 7: mod_base = OTHER; note = 2'-O-methyl cytosine
  modified_base 8: mod_base = OTHER; note = 2'-fluoro cytosine
  modified_base 9: mod_base = OTHER; note = 2'-O-methyl adenosine
  modified_base 10: mod_base = OTHER; note = 2'-fluoro adenosine
  modified_base 11: mod_base = OTHER; note = 2'-O-methyl guanosine
  modified_base 12: mod_base = OTHER; note = 2'-fluoro uridine
  modified_base 13: mod_base = OTHER; note = 2'-O-methyl guanosine
  modified_base 14: mod_base = OTHER; note = 2'-fluoro adenosine phosphorothioate
  modified_base 15: mod_base = OTHER; note = 2'-O-methyl guanosine phosphorothioate
  modified_base 16: mod_base = OTHER; note = 2'-fluoro guanosine phosphorothioate
  modified_base 17: mod_base = OTHER; note = 2'-O-methyl guanosine phosphorothioate
  modified_base 18: mod_base = OTHER; note = 2'-O-methyl adenosine phosphorothioate
  modified_base 19: mod_base = OTHER; note = 2'-O-methyl guanosine phosphorothioate
  modified_base 20: mod_base = OTHER; note = 2'-fluoro cytosine phosphorothioate
  modified_base 21: mod_base = OTHER; note = 2'-O-methyl uridine
taagacccaagtgagggagct

SEQ ID NO: 859 - RNA, 21 nt, synthetic construct
  source 1..21: mol_type = other RNA
  modified_base 1: mod_base = OTHER; note = 5' phosphate 2'-O-methyl uridine phosphorothioate
  modified_base 2: mod_base = OTHER; note = 2'-fluoro guanosine phosphorothioate
  modified_base 3: mod_base = OTHER; note = 2'-O-methyl guanosine
  modified_base 4: mod_base = OTHER; note = 2'-fluoro adenosine
  modified_base 5: mod_base = OTHER; note = 2'-fluoro adenosine
  modified_base 6: mod_base = OTHER; note = 2'-fluoro guanosine
  modified_base 7: mod_base = OTHER; note = 2'-O-methyl adenosine
  modified_base 8: mod_base = OTHER; note = 2'-fluoro cytosine
  modified_base 9: mod_base = OTHER; note = 2'-O-methyl cytosine
  modified_base 10: mod_base = OTHER; note = 2'-fluoro cytosine
  modified_base 11: mod_base = OTHER; note = 2'-O-methyl adenosine
  modified_base 12: mod_base = OTHER; note = 2'-fluoro adenosine
  modified_base 13: mod_base = OTHER; note = 2'-O-methyl guanosine
  modified_base 14: mod_base = OTHER; note = 2'-fluoro uridine phosphorothioate
  modified_base 15: mod_base = OTHER; note = 2'-O-methyl guanosine phosphorothioate
  modified_base 16: mod_base = OTHER; note = 2'-fluoro adenosine phosphorothioate
  modified_base 17: mod_base = OTHER; note = 2'-O-methyl guanosine phosphorothioate
  modified_base 18: mod_base = OTHER; note = 2'-O-methyl guanosine phosphorothioate
  modified_base 19: mod_base = OTHER; note = 2'-O-methyl guanosine phosphorothioate
  modified_base 20: mod_base = OTHER; note = 2'-fluoro adenosine phosphorothioate
  modified_base 21: mod_base = OTHER; note = 2'-O-methyl uridine
tggaagacccaagtgagggat

SEQ ID NO: 860 - RNA, 21 nt, synthetic construct
  source 1..21: mol_type = other RNA
  modified_base 1: mod_base = OTHER; note = 5' phosphate 2'-O-methyl uridine phosphorothioate
  modified_base 2: mod_base = OTHER; note = 2'-fluoro guanosine phosphorothioate
  modified_base 3: mod_base = OTHER; note = 2'-O-methyl adenosine
  modified_base 4: mod_base = OTHER; note = 2'-fluoro cytosine
  modified_base 5: mod_base = OTHER; note = 2'-fluoro adenosine
  modified_base 6: mod_base = OTHER; note = 2'-fluoro adenosine
  modified_base 7: mod_base = OTHER; note = 2'-O-methyl guanosine
  modified_base 8: mod_base = OTHER; note = 2'-fluoro guanosine
  modified_base 9: mod_base = OTHER; note = 2'-O-methyl guanosine
  modified_base 10: mod_base = OTHER; note = 2'-fluoro adenosine
  modified_base 11: mod_base = OTHER; note = 2'-O-methyl adenosine
  modified_base 12: mod_base = OTHER; note = 2'-fluoro guanosine
  modified_base 13: mod_base = OTHER; note = 2'-O-methyl adenosine
  modified_base 14: mod_base = OTHER; note = 2'-fluoro cytosine phosphorothioate
  modified_base 15: mod_base = OTHER; note = 2'-O-methyl cytosine phosphorothioate
  modified_base 16: mod_base = OTHER; note = 2'-fluoro cytosine phosphorothioate
  modified_base 17: mod_base = OTHER; note = 2'-O-methyl adenosine phosphorothioate
  modified_base 18: mod_base = OTHER; note = 2'-O-methyl adenosine phosphorothioate
  modified_base 19: mod_base = OTHER; note = 2'-O-methyl guanosine phosphorothioate
  modified_base 20: mod_base = OTHER; note = 2'-fluoro uridine phosphorothioate
  modified_base 21: mod_base = OTHER; note = 2'-O-methyl uridine
tgacaagggaagacccaagtt

SEQ ID NO: 861 - RNA, 21 nt, synthetic construct
  source 1..21: mol_type = other RNA
  modified_base 1: mod_base = OTHER; note = 5' phosphate 2'-O-methyl uridine phosphorothioate
  modified_base 2: mod_base = OTHER; note = 2'-fluoro guanosine phosphorothioate
  modified_base 3: mod_base = OTHER; note = 2'-O-methyl adenosine
  modified_base 4: mod_base = OTHER; note = 2'-fluoro guanosine
  modified_base 5: mod_base = OTHER; note = 2'-fluoro guanosine
  modified_base 6: mod_base = OTHER; note = 2'-fluoro adenosine
  modified_base 7: mod_base = OTHER; note = 2'-O-methyl cytosine
  modified_base 8: mod_base = OTHER; note = 2'-fluoro adenosine
  modified_base 9: mod_base = OTHER; note = 2'-O-methyl adenosine
  modified_base 10: mod_base = OTHER; note = 2'-fluoro guanosine
  modified_base 11: mod_base = OTHER; note = 2'-O-methyl guanosine
  modified_base 12: mod_base = OTHER; note = 2'-fluoro guanosine
  modified_base 13: mod_base = OTHER; note = 2'-O-methyl adenosine
  modified_base 14: mod_base = OTHER; note = 2'-fluoro adenosine phosphorothioate
  modified_base 15: mod_base = OTHER; note = 2'-O-methyl guanosine phosphorothioate
  modified_base 16: mod_base = OTHER; note = 2'-fluoro adenosine phosphorothioate
  modified_base 17: mod_base = OTHER; note = 2'-O-methyl cytosine phosphorothioate
  modified_base 18: mod_base = OTHER; note = 2'-O-methyl cytosine phosphorothioate
  modified_base 19: mod_base = OTHER; note = 2'-O-methyl cytosine phosphorothioate
  modified_base 20: mod_base = OTHER; note = 2'-fluoro adenosine phosphorothioate
  modified_base 21: mod_base = OTHER; note = 2'-O-methyl uridine
tgaggacaagggaagacccat

SEQ ID NO: 862 - RNA, 21 nt, synthetic construct
  source 1..21: mol_type = other RNA
  modified_base 1: mod_base = OTHER; note = 5' phosphate 2'-O-methyl uridine phosphorothioate
  modified_base 2: mod_base = OTHER; note = 2'-fluoro guanosine phosphorothioate
  modified_base 3: mod_base = OTHER; note = 2'-O-methyl cytosine
  modified_base 4: mod_base = OTHER; note = 2'-fluoro guanosine
  modified_base 5: mod_base = OTHER; note = 2'-fluoro adenosine
  modified_base 6: mod_base = OTHER; note = 2'-fluoro guanosine
  modified_base 7: mod_base = OTHER; note = 2'-O-methyl adenosine
  modified_base 8: mod_base = OTHER; note = 2'-fluoro guanosine
  modified_base 9: mod_base = OTHER; note = 2'-O-methyl guanosine
  modified_base 10: mod_base = OTHER; note = 2'-fluoro adenosine
  modified_base 11: mod_base = OTHER; note = 2'-O-methyl cytosine
  modified_base 12: mod_base = OTHER; note = 2'-fluoro adenosine
  modified_base 13: mod_base = OTHER; note = 2'-O-methyl adenosine
  modified_base 14: mod_base = OTHER; note = 2'-fluoro guanosine phosphorothioate
  modified_base 15: mod_base = OTHER; note = 2'-O-methyl guanosine phosphorothioate
  modified_base 16: mod_base = OTHER; note = 2'-fluoro guanosine phosphorothioate
  modified_base 17: mod_base = OTHER; note = 2'-O-methyl adenosine phosphorothioate
  modified_base 18: mod_base = OTHER; note = 2'-O-methyl adenosine phosphorothioate
  modified_base 19: mod_base = OTHER; note = 2'-O-methyl guanosine phosphorothioate
  modified_base 20: mod_base = OTHER; note = 2'-fluoro adenosine phosphorothioate
  modified_base 21: mod_base = OTHER; note = 2'-O-methyl uridine
tgcgagaggacaagggaagat

SEQ ID NO: 863 - RNA, 21 nt, synthetic construct
  source 1..21: mol_type = other RNA
  modified_base 1: mod_base = OTHER; note = 5' phosphate 2'-O-methyl uridine phosphorothioate
  modified_base 2: mod_base = OTHER; note = 2'-fluoro cytosine phosphorothioate
  modified_base 3: mod_base = OTHER; note = 2'-O-methyl guanosine
  modified_base 4: mod_base = OTHER; note = 2'-fluoro cytosine
  modified_base 5: mod_base = OTHER; note = 2'-fluoro guanosine
  modified_base 6: mod_base = OTHER; note = 2'-fluoro adenosine
  modified_base 7: mod_base = OTHER; note = 2'-O-methyl guanosine
  modified_base 8: mod_base = OTHER; note = 2'-fluoro adenosine
  modified_base 9: mod_base = OTHER; note = 2'-O-methyl guanosine
  modified_base 10: mod_base = OTHER; note = 2'-fluoro guanosine
  modified_base 11: mod_base = OTHER; note = 2'-O-methyl adenosine
  modified_base 12: mod_base = OTHER; note = 2'-fluoro cytosine
  modified_base 13: mod_base = OTHER; note = 2'-O-methyl adenosine
  modified_base 14: mod_base = OTHER; note = 2'-fluoro adenosine phosphorothioate
  modified_base 15: mod_base = OTHER; note = 2'-O-methyl guanosine phosphorothioate
  modified_base 16: mod_base = OTHER; note = 2'-fluoro guanosine phosphorothioate
  modified_base 17: mod_base = OTHER; note = 2'-O-methyl guanosine phosphorothioate
  modified_base 18: mod_base = OTHER; note = 2'-O-methyl adenosine phosphorothioate
  modified_base 19: mod_base = OTHER; note = 2'-O-methyl adenosine phosphorothioate
  modified_base 20: mod_base = OTHER; note = 2'-fluoro guanosine phosphorothioate
  modified_base 21: mod_base = OTHER; note = 2'-O-methyl uridine
tcgcgagaggacaagggaagt

SEQ ID NO: 864 - RNA, 21 nt, synthetic construct
  source 1..21: mol_type = other RNA
  modified_base 1: mod_base = OTHER; note = 5' phosphate 2'-O-methyl uridine phosphorothioate
  modified_base 2: mod_base = OTHER; note = 2'-fluoro uridine phosphorothioate
  modified_base 3: mod_base = OTHER; note = 2'-O-methyl cytosine
  modified_base 4: mod_base = OTHER; note = 2'-fluoro guanosine
  modified_base 5: mod_base = OTHER; note = 2'-fluoro cytosine
  modified_base 6: mod_base = OTHER; note = 2'-fluoro guanosine
  modified_base 7: mod_base = OTHER; note = 2'-O-methyl adenosine
  modified_base 8: mod_base = OTHER; note = 2'-fluoro guanosine
  modified_base 9: mod_base = OTHER; note = 2'-O-methyl adenosine
  modified_base 10: mod_base = OTHER; note = 2'-fluoro guanosine
  modified_base 11: mod_base = OTHER; note = 2'-O-methyl guanosine
  modified_base 12: mod_base = OTHER; note = 2'-fluoro adenosine
  modified_base 13: mod_base = OTHER; note = 2'-O-methyl cytosine
  modified_base 14: mod_base = OTHER; note = 2'-fluoro adenosine phosphorothioate
  modified_base 15: mod_base = OTHER; note = 2'-O-methyl adenosine phosphorothioate
  modified_base 16: mod_base = OTHER; note = 2'-fluoro guanosine phosphorothioate
  modified_base 17: mod_base = OTHER; note = 2'-O-methyl guanosine phosphorothioate
  modified_base 18: mod_base = OTHER; note = 2'-O-methyl guanosine phosphorothioate
  modified_base 19: mod_base = OTHER; note = 2'-O-methyl adenosine phosphorothioate
  modified_base 20: mod_base = OTHER; note = 2'-fluoro adenosine phosphorothioate
  modified_base 21: mod_base = OTHER; note = 2'-O-methyl uridine
ttcgcgagaggacaagggaat

SEQ ID NO: 865 - RNA, 21 nt, synthetic construct
  source 1..21: mol_type = other RNA
  modified_base 1: mod_base = OTHER; note = 5' phosphate 2'-O-methyl uridine phosphorothioate
  modified_base 2: mod_base = OTHER; note = 2'-fluoro cytosine phosphorothioate
  modified_base 3: mod_base = OTHER; note = 2'-O-methyl uridine
  modified_base 4: mod_base = OTHER; note = 2'-fluoro cytosine
  modified_base 5: mod_base = OTHER; note = 2'-fluoro guanosine
  modified_base 6: mod_base = OTHER; note = 2'-fluoro cytosine
  modified_base 7: mod_base = OTHER; note = 2'-O-methyl guanosine
  modified_base 8: mod_base = OTHER; note = 2'-fluoro adenosine
  modified_base 9: mod_base = OTHER; note = 2'-O-methyl guanosine
  modified_base 10: mod_base = OTHER; note = 2'-fluoro adenosine
  modified_base 11: mod_base = OTHER; note = 2'-O-methyl guanosine
  modified_base 12: mod_base = OTHER; note = 2'-fluoro guanosine
  modified_base 13: mod_base = OTHER; note = 2'-O-methyl adenosine
  modified_base 14: mod_base = OTHER; note = 2'-fluoro cytosine phosphorothioate
  modified_base 15: mod_base = OTHER; note = 2'-O-methyl adenosine phosphorothioate
  modified_base 16: mod_base = OTHER; note = 2'-fluoro adenosine phosphorothioate
  modified_base 17: mod_base = OTHER; note = 2'-O-methyl guanosine phosphorothioate
  modified_base 18: mod_base = OTHER; note = 2'-O-methyl guanosine phosphorothioate
  modified_base 19: mod_base = OTHER; note = 2'-O-methyl guanosine phosphorothioate
  modified_base 20: mod_base = OTHER; note = 2'-fluoro adenosine phosphorothioate
  modified_base 21: mod_base = OTHER; note = 2'-O-methyl uridine
tctcgcgagaggacaagggat

SEQ ID NO: 866 - RNA, 21 nt, synthetic construct
  source 1..21: mol_type = other RNA
  modified_base 1: mod_base = OTHER; note = 5' phosphate 2'-O-methyl uridine phosphorothioate
  modified_base 2: mod_base = OTHER; note = 2'-fluoro cytosine phosphorothioate
  modified_base 3: mod_base = OTHER; note = 2'-O-methyl adenosine
  modified_base 4: mod_base = OTHER; note = 2'-fluoro adenosine
  modified_base 5: mod_base = OTHER; note = 2'-fluoro guanosine
  modified_base 6: mod_base = OTHER; note = 2'-fluoro guanosine
  modified_base 7: mod_base = OTHER; note = 2'-O-methyl cytosine
  modified_base 8: mod_base = OTHER; note = 2'-fluoro uridine
  modified_base 9: mod_base = OTHER; note = 2'-O-methyl cytosine
  modified_base 10: mod_base = OTHER; note = 2'-fluoro uridine
  modified_base 11: mod_base = OTHER; note = 2'-O-methyl guanosine
  modified_base 12: mod_base = OTHER; note = 2'-fluoro cytosine
  modified_base 13: mod_base = OTHER; note = 2'-O-methyl cytosine
  modified_base 14: mod_base = OTHER; note = 2'-fluoro uridine phosphorothioate
  modified_base 15: mod_base = OTHER; note = 2'-O-methyl cytosine phosphorothioate
  modified_base 16: mod_base = OTHER; note = 2'-fluoro cytosine phosphorothioate
  modified_base 17: mod_base = OTHER; note = 2'-O-methyl cytosine phosphorothioate
  modified_base 18: mod_base = OTHER; note = 2'-O-methyl cytosine phosphorothioate
  modified_base 19: mod_base = OTHER; note = 2'-O-methyl uridine phosphorothioate
  modified_base 20: mod_base = OTHER; note = 2'-fluoro cytosine phosphorothioate
  modified_base 21: mod_base = OTHER; note = 2'-O-methyl uridine
tcaaggctctgcctcccctct

SEQ ID NO: 867 - RNA, 21 nt, synthetic construct
  source 1..21: mol_type = other RNA
  modified_base 1: mod_base = OTHER; note = 5' phosphate 2'-O-methyl uridine phosphorothioate
  modified_base 2: mod_base = OTHER; note = 2'-fluoro adenosine phosphorothioate
  modified_base 3: mod_base = OTHER; note = 2'-O-methyl cytosine
  modified_base 4: mod_base = OTHER; note = 2'-fluoro adenosine
  modified_base 5: mod_base = OTHER; note = 2'-fluoro adenosine
  modified_base 6: mod_base = OTHER; note = 2'-fluoro guanosine
  modified_base 7: mod_base = OTHER; note = 2'-O-methyl guanosine
  modified_base 8: mod_base = OTHER; note = 2'-fluoro cytosine
  modified_base 9: mod_base = OTHER; note = 2'-O-methyl uridine
  modified_base 10: mod_base = OTHER; note = 2'-fluoro cytosine
  modified_base 11: mod_base = OTHER; note = 2'-O-methyl uridine
  modified_base 12: mod_base = OTHER; note = 2'-fluoro guanosine
  modified_base 13: mod_base = OTHER; note = 2'-O-methyl cytosine
  modified_base 14: mod_base = OTHER; note = 2'-fluoro cytosine phosphorothioate
  modified_base 15: mod_base = OTHER; note = 2'-O-methyl uridine phosphorothioate
  modified_base 16: mod_base = OTHER; note = 2'-fluoro cytosine phosphorothioate
  modified_base 17: mod_base = OTHER; note = 2'-O-methyl cytosine phosphorothioate
  modified_base 18: mod_base = OTHER; note = 2'-O-methyl cytosine phosphorothioate
  modified_base 19: mod_base = OTHER; note = 2'-O-methyl cytosine phosphorothioate
  modified_base 20: mod_base = OTHER; note = 2'-fluoro uridine phosphorothioate
  modified_base 21: mod_base = OTHER; note = 2'-O-methyl uridine
tacaaggctctgcctcccctt

SEQ ID NO: 868 - RNA, 21 nt, synthetic construct
  source 1..21: mol_type = other RNA
  modified_base 1: mod_base = OTHER; note = 5' phosphate 2'-O-methyl uridine phosphorothioate
  modified_base 2: mod_base = OTHER; note = 2'-fluoro cytosine phosphorothioate
  modified_base 3: mod_base = OTHER; note = 2'-O-methyl adenosine
  modified_base 4: mod_base = OTHER; note = 2'-fluoro adenosine
  modified_base 5: mod_base = OTHER; note = 2'-fluoro cytosine
  modified_base 6: mod_base = OTHER; note = 2'-fluoro adenosine
  modified_base 7: mod_base = OTHER; note = 2'-O-methyl adenosine
  modified_base 8: mod_base = OTHER; note = 2'-fluoro guanosine
  modified_base 9: mod_base = OTHER; note = 2'-O-methyl guanosine
  modified_base 10: mod_base = OTHER; note = 2'-fluoro cytosine
  modified_base 11: mod_base = OTHER; note = 2'-O-methyl uridine
  modified_base 12: mod_base = OTHER; note = 2'-fluoro cytosine
  modified_base 13: mod_base = OTHER; note = 2'-O-methyl uridine
  modified_base 14: mod_base = OTHER; note = 2'-fluoro guanosine phosphorothioate
  modified_base 15: mod_base = OTHER; note = 2'-O-methyl cytosine phosphorothioate
  modified_base 16: mod_base = OTHER; note = 2'-fluoro cytosine phosphorothioate
  modified_base 17: mod_base = OTHER; note = 2'-O-methyl uridine phosphorothioate
  modified_base 18: mod_base = OTHER; note = 2'-O-methyl cytosine phosphorothioate
  modified_base 19: mod_base = OTHER; note = 2'-O-methyl cytosine phosphorothioate
  modified_base 20: mod_base = OTHER; note = 2'-fluoro cytosine phosphorothioate
  modified_base 21: mod_base = OTHER; note = 2'-O-methyl uridine
tcaacaaggctctgcctccct

SEQ ID NO: 869 - RNA, 21 nt, synthetic construct
  source 1..21: mol_type = other RNA
  modified_base 1: mod_base = OTHER; note = 5' phosphate 2'-O-methyl uridine phosphorothioate
  modified_base 2: mod_base = OTHER; note = 2'-fluoro cytosine phosphorothioate
  modified_base 3: mod_base = OTHER; note = 2'-O-methyl cytosine
  modified_base 4: mod_base = OTHER; note = 2'-fluoro adenosine
  modified_base 5: mod_base = OTHER; note = 2'-fluoro adenosine
  modified_base 6: mod_base = OTHER; note = 2'-fluoro cytosine
  modified_base 7: mod_base = OTHER; note = 2'-O-methyl adenosine
  modified_base 8: mod_base = OTHER; note = 2'-fluoro adenosine
  modified_base 9: mod_base = OTHER; note = 2'-O-methyl guanosine
  modified_base 10: mod_base = OTHER; note = 2'-fluoro guanosine
  modified_base 11: mod_base = OTHER; note = 2'-O-methyl cytosine
  modified_base 12: mod_base = OTHER; note = 2'-fluoro uridine
  modified_base 13: mod_base = OTHER; note = 2'-O-methyl cytosine
  modified_base 14: mod_base = OTHER; note = 2'-fluoro uridine phosphorothioate
  modified_base 15: mod_base = OTHER; note = 2'-O-methyl guanosine phosphorothioate
  modified_base 16: mod_base = OTHER; note = 2'-fluoro cytosine phosphorothioate
  modified_base 17: mod_base = OTHER; note = 2'-O-methyl cytosine phosphorothioate
  modified_base 18: mod_base = OTHER; note = 2'-O-methyl uridine phosphorothioate
  modified_base 19: mod_base = OTHER; note = 2'-O-methyl cytosine phosphorothioate
  modified_base 20: mod_base = OTHER; note = 2'-fluoro cytosine phosphorothioate
  modified_base 21: mod_base = OTHER; note = 2'-O-methyl uridine
tccaacaaggctctgcctcct

SEQ ID NO: 870 - RNA, 21 nt, synthetic construct
  source 1..21: mol_type = other RNA
  modified_base 1: mod_base = OTHER; note = 5' phosphate 2'-O-methyl uridine phosphorothioate
  modified_base 2: mod_base = OTHER; note = 2'-fluoro cytosine phosphorothioate
  modified_base 3: mod_base = OTHER; note = 2'-O-methyl cytosine
  modified_base 4: mod_base = OTHER; note = 2'-fluoro cytosine
  modified_base 5: mod_base = OTHER; note = 2'-fluoro adenosine
  modified_base 6: mod_base = OTHER; note = 2'-fluoro adenosine
  modified_base 7: mod_base = OTHER; note = 2'-O-methyl cytosine
  modified_base 8: mod_base = OTHER; note = 2'-fluoro adenosine
  modified_base 9: mod_base = OTHER; note = 2'-O-methyl adenosine
  modified_base 10: mod_base = OTHER; note = 2'-fluoro guanosine
  modified_base 11: mod_base = OTHER; note = 2'-O-methyl guanosine
  modified_base 12: mod_base = OTHER; note = 2'-fluoro cytosine
  modified_base 13: mod_base = OTHER; note = 2'-O-methyl uridine
  modified_base 14: mod_base = OTHER; note = 2'-fluoro cytosine phosphorothioate
  modified_base 15: mod_base = OTHER; note = 2'-O-methyl uridine phosphorothioate
  modified_base 16: mod_base = OTHER; note = 2'-fluoro guanosine phosphorothioate
  modified_base 17: mod_base = OTHER; note = 2'-O-methyl cytosine phosphorothioate
  modified_base 18: mod_base = OTHER; note = 2'-O-methyl cytosine phosphorothioate
  modified_base 19: mod_base = OTHER; note = 2'-O-methyl uridine phosphorothioate
  modified_base 20: mod_base = OTHER; note = 2'-fluoro cytosine phosphorothioate
  modified_base 21: mod_base = OTHER; note = 2'-O-methyl uridine
tcccaacaaggctctgcctct

SEQ ID NO: 871 - RNA, 21 nt, synthetic construct
  source 1..21: mol_type = other RNA
  modified_base 1: mod_base = OTHER; note = 5' phosphate 2'-O-methyl uridine phosphorothioate
  modified_base 2: mod_base = OTHER; note = 2'-fluoro cytosine phosphorothioate
  modified_base 3: mod_base = OTHER; note = 2'-O-methyl cytosine
  modified_base 4: mod_base = OTHER; note = 2'-fluoro cytosine
  modified_base 5: mod_base = OTHER; note = 2'-fluoro cytosine
  modified_base 6: mod_base = OTHER; note = 2'-fluoro adenosine
  modified_base 7: mod_base = OTHER; note = 2'-O-methyl adenosine
  modified_base 8: mod_base = OTHER; note = 2'-fluoro cytosine
  modified_base 9: mod_base = OTHER; note = 2'-O-methyl adenosine
  modified_base 10: mod_base = OTHER; note = 2'-fluoro adenosine
  modified_base 11: mod_base = OTHER; note = 2'-O-methyl guanosine
  modified_base 12: mod_base = OTHER; note = 2'-fluoro guanosine
  modified_base 13: mod_base = OTHER; note = 2'-O-methyl cytosine
  modified_base 14: mod_base = OTHER; note = 2'-fluoro uridine phosphorothioate
  modified_base 15: mod_base = OTHER; note = 2'-O-methyl cytosine phosphorothioate
  modified_base 16: mod_base = OTHER; note = 2'-fluoro uridine phosphorothioate
  modified_base 17: mod_base = OTHER; note = 2'-O-methyl guanosine phosphorothioate
  modified_base 18: mod_base = OTHER; note = 2'-O-methyl cytosine phosphorothioate
  modified_base 19: mod_base = OTHER; note = 2'-O-methyl cytosine phosphorothioate
  modified_base 20: mod_base = OTHER; note = 2'-fluoro uridine phosphorothioate
  modified_base 21: mod_base = OTHER; note = 2'-O-methyl uridine
tccccaacaaggctctgcctt

SEQ ID NO: 872 - RNA, 21 nt, synthetic construct
  source 1..21: mol_type = other RNA
  modified_base 1: mod_base = OTHER; note = 5' phosphate 2'-O-methyl uridine phosphorothioate
  modified_base 2: mod_base = OTHER; note = 2'-fluoro cytosine phosphorothioate
  modified_base 3: mod_base = OTHER; note = 2'-O-methyl adenosine
  modified_base 4: mod_base = OTHER; note = 2'-fluoro guanosine
  modified_base 5: mod_base = OTHER; note = 2'-fluoro guanosine
  modified_base 6: mod_base = OTHER; note = 2'-fluoro cytosine
  modified_base 7: mod_base = OTHER; note = 2'-O-methyl cytosine
  modified_base 8: mod_base = OTHER; note = 2'-fluoro cytosine
  modified_base 9: mod_base = OTHER; note = 2'-O-methyl cytosine
  modified_base 10: mod_base = OTHER; note = 2'-fluoro adenosine
  modified_base 11: mod_base = OTHER; note = 2'-O-methyl adenosine
  modified_base 12: mod_base = OTHER; note = 2'-fluoro cytosine
  modified_base 13: mod_base = OTHER; note = 2'-O-methyl adenosine
  modified_base 14: mod_base = OTHER; note = 2'-fluoro adenosine phosphorothioate
  modified_base 15: mod_base = OTHER; note = 2'-O-methyl guanosine phosphorothioate
  modified_base 16: mod_base = OTHER; note = 2'-fluoro guanosine phosphorothioate
  modified_base 17: mod_base = OTHER; note = 2'-O-methyl cytosine phosphorothioate
  modified_base 18: mod_base = OTHER; note = 2'-O-methyl uridine phosphorothioate
  modified_base 19: mod_base = OTHER; note = 2'-O-methyl cytosine phosphorothioate
  modified_base 20: mod_base = OTHER; note = 2'-fluoro uridine phosphorothioate
  modified_base 21: mod_base = OTHER; note = 2'-O-methyl uridine
tcaggccccaacaaggctctt

SEQ ID NO: 873 - RNA, 21 nt, synthetic construct
  source 1..21: mol_type = other RNA
  modified_base 1: mod_base = OTHER; note = 5' phosphate 2'-O-methyl uridine phosphorothioate
  modified_base 2: mod_base = OTHER; note = 2'-fluoro adenosine phosphorothioate
  modified_base 3: mod_base = OTHER; note = 2'-O-methyl cytosine
  modified_base 4: mod_base = OTHER; note = 2'-fluoro adenosine
  modified_base 5: mod_base = OTHER; note = 2'-fluoro guanosine
  modified_base 6: mod_base = OTHER; note = 2'-fluoro guanosine
  modified_base 7: mod_base = OTHER; note = 2'-O-methyl cytosine
  modified_base 8: mod_base = OTHER; note = 2'-fluoro cytosine
  modified_base 9: mod_base = OTHER; note = 2'-O-methyl cytosine
  modified_base 10: mod_base = OTHER; note = 2'-fluoro cytosine
  modified_base 11: mod_base = OTHER; note = 2'-O-methyl adenosine
  modified_base 12: mod_base = OTHER; note = 2'-fluoro adenosine
  modified_base 13: mod_base = OTHER; note = 2'-O-methyl cytosine
  modified_base 14: mod_base = OTHER; note = 2'-fluoro adenosine phosphorothioate
  modified_base 15: mod_base = OTHER; note = 2'-O-methyl adenosine phosphorothioate
  modified_base 16: mod_base = OTHER; note = 2'-fluoro guanosine phosphorothioate
  modified_base 17: mod_base = OTHER; note = 2'-O-methyl guanosine phosphorothioate
  modified_base 18: mod_base = OTHER; note = 2'-O-methyl cytosine phosphorothioate
  modified_base 19: mod_base = OTHER; note = 2'-O-methyl uridine phosphorothioate
  modified_base 20: mod_base = OTHER; note = 2'-fluoro cytosine phosphorothioate
  modified_base 21: mod_base = OTHER; note = 2'-O-methyl uridine
tacaggccccaacaaggctct

SEQ ID NO: 874 - RNA, 21 nt, synthetic construct
  source 1..21: mol_type = other RNA
  modified_base 1: mod_base = OTHER; note = 5' phosphate 2'-O-methyl uridine phosphorothioate
  modified_base 2: mod_base = OTHER; note = 2'-fluoro guanosine phosphorothioate
  modified_base 3: mod_base = OTHER; note = 2'-O-methyl adenosine
  modified_base 4: mod_base = OTHER; note = 2'-fluoro cytosine
  modified_base 5: mod_base = OTHER; note = 2'-fluoro adenosine
  modified_base 6: mod_base = OTHER; note = 2'-fluoro guanosine
  modified_base 7: mod_base = OTHER; note = 2'-O-methyl guanosine
  modified_base 8: mod_base = OTHER; note = 2'-fluoro cytosine
  modified_base 9: mod_base = OTHER; note = 2'-O-methyl cytosine
  modified_base 10: mod_base = OTHER; note = 2'-fluoro cytosine
  modified_base 11: mod_base = OTHER; note = 2'-O-methyl cytosine
  modified_base 12: mod_base = OTHER; note = 2'-fluoro adenosine
  modified_base 13: mod_base = OTHER; note = 2'-O-methyl adenosine
  modified_base 14: mod_base = OTHER; note = 2'-fluoro cytosine phosphorothioate
  modified_base 15: mod_base = OTHER; note = 2'-O-methyl adenosine phosphorothioate
  modified_base 16: mod_base = OTHER; note = 2'-fluoro adenosine phosphorothioate
  modified_base 17: mod_base = OTHER; note = 2'-O-methyl guanosine phosphorothioate
  modified_base 18: mod_base = OTHER; note = 2'-O-methyl guanosine phosphorothioate
  modified_base 19: mod_base = OTHER; note = 2'-O-methyl cytosine phosphorothioate
  modified_base 20: mod_base = OTHER; note = 2'-fluoro uridine phosphorothioate
  modified_base 21: mod_base = OTHER; note = 2'-O-methyl uridine
tgacaggccccaacaaggctt

SEQ ID NO: 875 - RNA, 21 nt, synthetic construct
  source 1..21: mol_type = other RNA
  modified_base 1: mod_base = OTHER; note = 5' phosphate 2'-O-methyl uridine phosphorothioate
  modified_base 2: mod_base = OTHER; note = 2'-fluoro adenosine phosphorothioate
  modified_base 3: mod_base = OTHER; note = 2'-O-methyl guanosine
  modified_base 4: mod_base = OTHER; note = 2'-fluoro guanosine
  modified_base 5: mod_base = OTHER; note = 2'-fluoro adenosine
  modified_base 6: mod_base = OTHER; note = 2'-fluoro cytosine
  modified_base 7: mod_base = OTHER; note = 2'-O-methyl adenosine
  modified_base 8: mod_base = OTHER; note = 2'-fluoro guanosine
  modified_base 9: mod_base = OTHER; note = 2'-O-methyl guanosine
  modified_base 10: mod_base = OTHER; note = 2'-fluoro cytosine
  modified_base 11: mod_base = OTHER; note = 2'-O-methyl cytosine
  modified_base 12: mod_base = OTHER; note = 2'-fluoro cytosine
  modified_base 13: mod_base = OTHER; note = 2'-O-methyl cytosine
  modified_base 14: mod_base = OTHER; note = 2'-fluoro adenosine phosphorothioate
  modified_base 15: mod_base = OTHER; note = 2'-O-methyl adenosine phosphorothioate
  modified_base 16: mod_base = OTHER; note = 2'-fluoro cytosine phosphorothioate
  modified_base 17: mod_base = OTHER; note = 2'-O-methyl adenosine phosphorothioate
  modified_base 18: mod_base = OTHER; note = 2'-O-methyl adenosine phosphorothioate
  modified_base 19: mod_base = OTHER; note = 2'-O-methyl guanosine phosphorothioate
  modified_base 20: mod_base = OTHER; note = 2'-fluoro guanosine phosphorothioate
  modified_base 21: mod_base = OTHER; note = 2'-O-methyl uridine
taggacaggccccaacaaggt

SEQ ID NO: 876 - RNA, 21 nt, synthetic construct
  source 1..21: mol_type = other RNA
  modified_base 1: mod_base = OTHER; note = 5' phosphate 2'-O-methyl uridine phosphorothioate
  modified_base 2: mod_base = OTHER; note = 2'-fluoro guanosine phosphorothioate
  modified_base 3: mod_base = OTHER; note = 2'-O-methyl adenosine
  modified_base 4: mod_base = OTHER; note = 2'-fluoro adenosine
  modified_base 5: mod_base = OTHER; note = 2'-fluoro uridine
  modified_base 6: mod_base = OTHER; note = 2'-fluoro uridine
  modified_base 7: mod_base = OTHER; note = 2'-O-methyl cytosine
  modified_base 8: mod_base = OTHER; note = 2'-fluoro adenosine
  modified_base 9: mod_base = OTHER; note = 2'-O-methyl guanosine
  modified_base 10: mod_base = OTHER; note = 2'-fluoro guanosine
  modified_base 11: mod_base = OTHER; note = 2'-O-methyl adenosine
  modified_base 12: mod_base = OTHER; note = 2'-fluoro cytosine
  modified_base 13: mod_base = OTHER; note = 2'-O-methyl adenosine
  modified_base 14: mod_base = OTHER; note = 2'-fluoro guanosine phosphorothioate
  modified_base 15: mod_base = OTHER; note = 2'-O-methyl guanosine phosphorothioate
  modified_base 16: mod_base = OTHER; note = 2'-fluoro cytosine phosphorothioate
  modified_base 17: mod_base = OTHER; note = 2'-O-methyl cytosine phosphorothioate
  modified_base 18: mod_base = OTHER; note = 2'-O-methyl cytosine phosphorothioate
  modified_base 19: mod_base = OTHER; note = 2'-O-methyl cytosine phosphorothioate
  modified_base 20: mod_base = OTHER; note = 2'-fluoro adenosine phosphorothioate
  modified_base 21: mod_base = OTHER; note = 2'-O-methyl uridine
tgaattcaggacaggccccat

SEQ ID NO: 877 - RNA, 21 nt, synthetic construct
  source 1..21: mol_type = other RNA
  modified_base 1: mod_base = OTHER; note = 5' phosphate 2'-O-methyl uridine phosphorothioate
  modified_base 2: mod_base = OTHER; note = 2'-fluoro uridine phosphorothioate
  modified_base 3: mod_base = OTHER; note = 2'-O-methyl guanosine
  modified_base 4: mod_base = OTHER; note = 2'-fluoro adenosine
  modified_base 5: mod_base = OTHER; note = 2'-fluoro adenosine
  modified_base 6: mod_base = OTHER; note = 2'-fluoro uridine
  modified_base 7: mod_base = OTHER; note = 2'-O-methyl uridine
  modified_base 8: mod_base = OTHER; note = 2'-fluoro cytosine
  modified_base 9: mod_base = OTHER; note = 2'-O-methyl adenosine
  modified_base 10: mod_base = OTHER; note = 2'-fluoro guanosine
  modified_base 11: mod_base = OTHER; note = 2'-O-methyl guanosine
  modified_base 12: mod_base = OTHER; note = 2'-fluoro adenosine
  modified_base 13: mod_base = OTHER; note = 2'-O-methyl cytosine
  modified_base 14: mod_base = OTHER; note = 2'-fluoro adenosine phosphorothioate
  modified_base 15: mod_base = OTHER; note = 2'-O-methyl guanosine phosphorothioate
  modified_base 16: mod_base = OTHER; note = 2'-fluoro guanosine phosphorothioate
  modified_base 17: mod_base = OTHER; note = 2'-O-methyl cytosine phosphorothioate
  modified_base 18: mod_base = OTHER; note = 2'-O-methyl cytosine phosphorothioate
  modified_base 19: mod_base = OTHER; note = 2'-O-methyl cytosine phosphorothioate
  modified_base 20: mod_base = OTHER; note = 2'-fluoro cytosine phosphorothioate
  modified_base 21: mod_base = OTHER; note = 2'-O-methyl uridine
ttgaattcaggacaggcccct

SEQ ID NO: 878 - RNA, 21 nt, synthetic construct
  source 1..21: mol_type = other RNA
  modified_base 1: mod_base = OTHER; note = 5' phosphate 2'-O-methyl uridine phosphorothioate
  modified_base 2: mod_base = OTHER; note = 2'-fluoro guanosine phosphorothioate
  modified_base 3: mod_base = OTHER; note = 2'-O-methyl uridine
  modified_base 4: mod_base = OTHER; note = 2'-fluoro guanosine
  modified_base 5: mod_base = OTHER; note = 2'-fluoro uridine
  modified_base 6: mod_base = OTHER; note = 2'-fluoro cytosine
  modified_base 7: mod_base = OTHER; note = 2'-O-methyl guanosine
  modified_base 8: mod_base = OTHER; note = 2'-fluoro cytosine
  modified_base 9: mod_base = OTHER; note = 2'-O-methyl cytosine
  modified_base 10: mod_base = OTHER; note = 2'-fluoro guanosine
  modified_base 11: mod_base = OTHER; note = 2'-O-methyl guanosine
  modified_base 12: mod_base = OTHER; note = 2'-fluoro cytosine
  modified_base 13: mod_base = OTHER; note = 2'-O-methyl cytosine
  modified_base 14: mod_base = OTHER; note = 2'-fluoro cytosine phosphorothioate
  modified_base 15: mod_base = OTHER; note = 2'-O-methyl guanosine phosphorothioate
  modified_base 16: mod_base = OTHER; note = 2'-fluoro cytosine phosphorothioate
  modified_base 17: mod_base = OTHER; note = 2'-O-methyl adenosine phosphorothioate
  modified_base 18: mod_base = OTHER; note = 2'-O-methyl guanosine phosphorothioate
  modified_base 19: mod_base = OTHER; note = 2'-O-methyl guanosine phosphorothioate
  modified_base 20: mod_base = OTHER; note = 2'-fluoro cytosine phosphorothioate
  modified_base 21: mod_base = OTHER; note = 2'-O-methyl uridine
tgtgtcgccggcccgcaggct

SEQ ID NO: 879 - RNA, 21 nt, synthetic construct
  source 1..21: mol_type = other RNA
  modified_base 1: mod_base = OTHER; note = 5' phosphate 2'-O-methyl uridine phosphorothioate
  modified_base 2: mod_base = OTHER; note = 2'-fluoro cytosine phosphorothioate
  modified_base 3: mod_base = OTHER; note = 2'-O-methyl guanosine
  modified_base 4: mod_base = OTHER; note = 2'-fluoro uridine
  modified_base 5: mod_base = OTHER; note = 2'-fluoro guanosine
  modified_base 6: mod_base = OTHER; note = 2'-fluoro uridine
  modified_base 7: mod_base = OTHER; note = 2'-O-methyl cytosine
  modified_base 8: mod_base = OTHER; note = 2'-fluoro guanosine
  modified_base 9: mod_base = OTHER; note = 2'-O-methyl cytosine
  modified_base 10: mod_base = OTHER; note = 2'-fluoro cytosine
  modified_base 11: mod_base = OTHER; note = 2'-O-methyl guanosine
  modified_base 12: mod_base = OTHER; note = 2'-fluoro guanosine
  modified_base 13: mod_base = OTHER; note = 2'-O-methyl cytosine
  modified_base 14: mod_base = OTHER; note = 2'-fluoro cytosine phosphorothioate
  modified_base 15: mod_base = OTHER; note = 2'-O-methyl cytosine phosphorothioate
  modified_base 16: mod_base = OTHER; note = 2'-fluoro guanosine phosphorothioate
  modified_base 17: mod_base = OTHER; note = 2'-O-methyl cytosine phosphorothioate
  modified_base 18: mod_base = OTHER; note = 2'-O-methyl adenosine phosphorothioate
  modified_base 19: mod_base = OTHER; note = 2'-O-methyl guanosine phosphorothioate
  modified_base 20: mod_base = OTHER; note = 2'-fluoro guanosine phosphorothioate
  modified_base 21: mod_base = OTHER; note = 2'-O-methyl uridine
tcgtgtcgccggcccgcaggt

SEQ ID NO: 880 - RNA, 21 nt, synthetic construct
  source 1..21: mol_type = other RNA
  modified_base 1: mod_base = OTHER; note = 5' phosphate 2'-O-methyl uridine phosphorothioate
  modified_base 2: mod_base = OTHER; note = 2'-fluoro uridine phosphorothioate
  modified_base 3: mod_base = OTHER; note = 2'-O-methyl cytosine
  modified_base 4: mod_base = OTHER; note = 2'-fluoro guanosine
  modified_base 5: mod_base = OTHER; note = 2'-fluoro uridine
  modified_base 6: mod_base = OTHER; note = 2'-fluoro guanosine
  modified_base 7: mod_base = OTHER; note = 2'-O-methyl uridine
  modified_base 8: mod_base = OTHER; note = 2'-fluoro cytosine
  modified_base 9: mod_base = OTHER; note = 2'-O-methyl guanosine
  modified_base 10: mod_base = OTHER; note = 2'-fluoro cytosine
  modified_base 11: mod_base = OTHER; note = 2'-O-methyl cytosine
  modified_base 12: mod_base = OTHER; note = 2'-fluoro guanosine
  modified_base 13: mod_base = OTHER; note = 2'-O-methyl guanosine
  modified_base 14: mod_base = OTHER; note = 2'-fluoro cytosine phosphorothioate
  modified_base 15: mod_base = OTHER; note = 2'-O-methyl cytosine phosphorothioate
  modified_base 16: mod_base = OTHER; note = 2'-fluoro cytosine phosphorothioate
  modified_base 17: mod_base = OTHER; note = 2'-O-methyl guanosine phosphorothioate
  modified_base 18: mod_base = OTHER; note = 2'-O-methyl cytosine phosphorothioate
  modified_base 19: mod_base = OTHER; note = 2'-O-methyl adenosine phosphorothioate
  modified_base 20: mod_base = OTHER; note = 2'-fluoro guanosine phosphorothioate
  modified_base 21: mod_base = OTHER; note = 2'-O-methyl uridine
ttcgtgtcgccggcccgcagt

SEQ ID NO: 881 - RNA, 21 nt, synthetic construct
  source 1..21: mol_type = other RNA
  modified_base 1: mod_base = OTHER; note = 5' phosphate 2'-O-methyl uridine phosphorothioate
  modified_base 2: mod_base = OTHER; note = 2'-fluoro uridine phosphorothioate
  modified_base 3: mod_base = OTHER; note = 2'-O-methyl uridine
  modified_base 4: mod_base = OTHER; note = 2'-fluoro cytosine
  modified_base 5: mod_base = OTHER; note = 2'-fluoro guanosine
  modified_base 6: mod_base = OTHER; note = 2'-fluoro uridine
  modified_base 7: mod_base = OTHER; note = 2'-O-methyl guanosine
  modified_base 8: mod_base = OTHER; note = 2'-fluoro uridine
  modified_base 9: mod_base = OTHER; note = 2'-O-methyl cytosine
  modified_base 10: mod_base = OTHER; note = 2'-fluoro guanosine
  modified_base 11: mod_base = OTHER; note = 2'-O-methyl cytosine
  modified_base 12: mod_base = OTHER; note = 2'-fluoro cytosine
  modified_base 13: mod_base = OTHER; note = 2'-O-methyl guanosine
  modified_base 14: mod_base = OTHER; note = 2'-fluoro guanosine phosphorothioate
  modified_base 15: mod_base = OTHER; note = 2'-O-methyl cytosine phosphorothioate
  modified_base 16: mod_base = OTHER; note = 2'-fluoro cytosine phosphorothioate
  modified_base 17: mod_base = OTHER; note = 2'-O-methyl cytosine phosphorothioate
  modified_base 18: mod_base = OTHER; note = 2'-O-methyl guanosine phosphorothioate
  modified_base 19: mod_base = OTHER; note = 2'-O-methyl cytosine phosphorothioate
  modified_base 20: mod_base = OTHER; note = 2'-fluoro adenosine phosphorothioate
  modified_base 21: mod_base = OTHER; note = 2'-O-methyl uridine
tttcgtgtcgccggcccgcat

SEQ ID NO: 882 - RNA, 21 nt, synthetic construct
  source 1..21: mol_type = other RNA
  modified_base 1: mod_base = OTHER; note = 5' phosphate 2'-O-methyl uridine phosphorothioate
  modified_base 2: mod_base = OTHER; note = 2'-fluoro guanosine phosphorothioate
  modified_base 3: mod_base = OTHER; note = 2'-O-methyl uridine
  modified_base 4: mod_base = OTHER; note = 2'-fluoro uridine
  modified_base 5: mod_base = OTHER; note = 2'-fluoro cytosine
  modified_base 6: mod_base = OTHER; note = 2'-fluoro guanosine
  modified_base 7: mod_base = OTHER; note = 2'-O-methyl uridine
  modified_base 8: mod_base = OTHER; note = 2'-fluoro guanosine
  modified_base 9: mod_base = OTHER; note = 2'-O-methyl uridine
  modified_base 10: mod_base = OTHER; note = 2'-fluoro cytosine
  modified_base 11: mod_base = OTHER; note = 2'-O-methyl guanosine
  modified_base 12: mod_base = OTHER; note = 2'-fluoro cytosine
  modified_base 13: mod_base = OTHER; note = 2'-O-methyl cytosine
  modified_base 14: mod_base = OTHER; note = 2'-fluoro guanosine phosphorothioate
  modified_base 15: mod_base = OTHER; note = 2'-O-methyl guanosine phosphorothioate
  modified_base 16: mod_base = OTHER; note = 2'-fluoro cytosine phosphorothioate
  modified_base 17: mod_base = OTHER; note = 2'-O-methyl cytosine phosphorothioate
  modified_base 18: mod_base = OTHER; note = 2'-O-methyl cytosine phosphorothioate
  modified_base 19: mod_base = OTHER; note = 2'-O-methyl guanosine phosphorothioate
  modified_base 20: mod_base = OTHER; note = 2'-fluoro cytosine phosphorothioate
  modified_base 21: mod_base = OTHER; note = 2'-O-methyl uridine
tgttcgtgtcgccggcccgct

SEQ ID NO: 883 - RNA, 21 nt, synthetic construct
  source 1..21: mol_type = other RNA
  modified_base 1: mod_base = OTHER; note = 5' phosphate 2'-O-methyl uridine phosphorothioate
  modified_base 2: mod_base = OTHER; note = 2'-fluoro guanosine phosphorothioate
  modified_base 3: mod_base = OTHER; note = 2'-O-methyl guanosine
  modified_base 4: mod_base = OTHER; note = 2'-fluoro guanosine
  modified_base 5: mod_base = OTHER; note = 2'-fluoro uridine
  modified_base 6: mod_base = OTHER; note = 2'-fluoro uridine
  modified_base 7: mod_base = OTHER; note = 2'-O-methyl cytosine
  modified_base 8: mod_base = OTHER; note = 2'-fluoro guanosine
  modified_base 9: mod_base = OTHER; note = 2'-O-methyl uridine
  modified_base 10: mod_base = OTHER; note = 2'-fluoro guanosine
  modified_base 11: mod_base = OTHER; note = 2'-O-methyl uridine
  modified_base 12: mod_base = OTHER; note = 2'-fluoro cytosine
  modified_base 13: mod_base = OTHER; note = 2'-O-methyl guanosine
  modified_base 14: mod_base = OTHER; note = 2'-fluoro cytosine phosphorothioate
  modified_base 15: mod_base = OTHER; note = 2'-O-methyl cytosine phosphorothioate
  modified_base 16: mod_base = OTHER; note = 2'-fluoro guanosine phosphorothioate
  modified_base 17: mod_base = OTHER; note = 2'-O-methyl guanosine phosphorothioate
  modified_base 18: mod_base = OTHER; note = 2'-O-methyl cytosine phosphorothioate
  modified_base 19: mod_base = OTHER; note = 2'-O-methyl cytosine phosphorothioate
  modified_base 20: mod_base = OTHER; note = 2'-fluoro cytosine phosphorothioate
  modified_base 21: mod_base = OTHER; note = 2'-O-methyl uridine
tgggttcgtgtcgccggccct

SEQ ID NO: 884 - RNA, 21 nt, synthetic construct
  source 1..21: mol_type = other RNA
  modified_base 1: mod_base = OTHER; note = 5' phosphate 2'-O-methyl uridine phosphorothioate
  modified_base 2: mod_base = OTHER; note = 2'-fluoro guanosine phosphorothioate
  modified_base 3: mod_base = OTHER; note = 2'-O-methyl guanosine
  modified_base 4: mod_base = OTHER; note = 2'-fluoro guanosine
  modified_base 5: mod_base = OTHER; note = 2'-fluoro guanosine
  modified_base 6: mod_base = OTHER; note = 2'-fluoro uridine
  modified_base 7: mod_base = OTHER; note = 2'-O-methyl uridine
  modified_base 8: mod_base = OTHER; note = 2'-fluoro cytosine
  modified_base 9: mod_base = OTHER; note = 2'-O-methyl guanosine
  modified_base 10: mod_base = OTHER; note = 2'-fluoro uridine
  modified_base 11: mod_base = OTHER; note = 2'-O-methyl guanosine
  modified_base 12: mod_base = OTHER; note = 2'-fluoro uridine
  modified_base 13: mod_base = OTHER; note = 2'-O-methyl cytosine
  modified_base 14: mod_base = OTHER; note = 2'-fluoro guanosine phosphorothioate
  modified_base 15: mod_base = OTHER; note = 2'-O-methyl cytosine phosphorothioate
  modified_base 16: mod_base = OTHER; note = 2'-fluoro cytosine phosphorothioate
  modified_base 17: mod_base = OTHER; note = 2'-O-methyl guanosine phosphorothioate
  modified_base 18: mod_base = OTHER; note = 2'-O-methyl guanosine phosphorothioate
  modified_base 19: mod_base = OTHER; note = 2'-O-methyl cytosine phosphorothioate
  modified_base 20: mod_base = OTHER; note = 2'-fluoro cytosine phosphorothioate
  modified_base 21: mod_base = OTHER; note = 2'-O-methyl uridine
tggggttcgtgtcgccggcct

SEQ ID NO: 885 - RNA, 21 nt, synthetic construct
  source 1..21: mol_type = other RNA
  modified_base 1: mod_base = OTHER; note = 5' phosphate 2'-O-methyl uridine phosphorothioate
  modified_base 2: mod_base = OTHER; note = 2'-fluoro cytosine phosphorothioate
  modified_base 3: mod_base = OTHER; note = 2'-O-methyl uridine
  modified_base 4: mod_base = OTHER; note = 2'-fluoro cytosine
  modified_base 5: mod_base = OTHER; note = 2'-fluoro uridine
  modified_base 6: mod_base = OTHER; note = 2'-fluoro guanosine
  modified_base 7: mod_base = OTHER; note = 2'-O-methyl cytosine
  modified_base 8: mod_base = OTHER; note = 2'-fluoro guanosine
  modified_base 9: mod_base = OTHER; note = 2'-O-methyl guanosine
  modified_base 10: mod_base = OTHER; note = 2'-fluoro guanosine
  modified_base 11: mod_base = OTHER; note = 2'-O-methyl guanosine
  modified_base 12: mod_base = OTHER; note = 2'-fluoro cytosine
  modified_base 13: mod_base = OTHER; note = 2'-O-methyl cytosine
  modified_base 14: mod_base = OTHER; note = 2'-fluoro guanosine phosphorothioate
  modified_base 15: mod_base = OTHER; note = 2'-O-methyl guanosine phosphorothioate
  modified_base 16: mod_base = OTHER; note = 2'-fluoro guanosine phosphorothioate
  modified_base 17: mod_base = OTHER; note = 2'-O-methyl guanosine phosphorothioate
  modified_base 18: mod_base = OTHER; note = 2'-O-methyl guanosine phosphorothioate
  modified_base 19: mod_base = OTHER; note = 2'-O-methyl uridine phosphorothioate
  modified_base 20: mod_base = OTHER; note = 2'-fluoro uridine phosphorothioate
  modified_base 21: mod_base = OTHER; note = 2'-O-methyl uridine
tctctgcggggccgggggttt

SEQ ID NO: 886 - RNA, 21 nt, synthetic construct
  source 1..21: mol_type = other RNA
  modified_base 1: mod_base = OTHER; note = 5' phosphate 2'-O-methyl uridine phosphorothioate
  modified_base 2: mod_base = OTHER; note = 2'-fluoro uridine phosphorothioate
  modified_base 3: mod_base = OTHER; note = 2'-O-methyl cytosine
  modified_base 4: mod_base = OTHER; note = 2'-fluoro uridine
  modified_base 5: mod_base = OTHER; note = 2'-fluoro cytosine
  modified_base 6: mod_base = OTHER; note = 2'-fluoro uridine
  modified_base 7: mod_base = OTHER; note = 2'-O-methyl guanosine
  modified_base 8: mod_base = OTHER; note = 2'-fluoro cytosine
  modified_base 9: mod_base = OTHER; note = 2'-O-methyl guanosine
  modified_base 10: mod_base = OTHER; note = 2'-fluoro guanosine
  modified_base 11: mod_base = OTHER; note = 2'-O-methyl guanosine
  modified_base 12: mod_base = OTHER; note = 2'-fluoro guanosine
  modified_base 13: mod_base = OTHER; note = 2'-O-methyl cytosine
  modified_base 14: mod_base = OTHER; note = 2'-fluoro cytosine phosphorothioate
  modified_base 15: mod_base = OTHER; note = 2'-O-methyl guanosine phosphorothioate
  modified_base 16: mod_base = OTHER; note = 2'-fluoro guanosine phosphorothioate
  modified_base 17: mod_base = OTHER; note = 2'-O-methyl guanosine phosphorothioate
  modified_base 18: mod_base = OTHER; note = 2'-O-methyl guanosine phosphorothioate
  modified_base 19: mod_base = OTHER; note = 2'-O-methyl guanosine phosphorothioate
  modified_base 20: mod_base = OTHER; note = 2'-fluoro uridine phosphorothioate
  modified_base 21: mod_base = OTHER; note = 2'-O-methyl uridine
ttctctgcggggccgggggtt

SEQ ID NO: 887 - RNA, 21 nt, synthetic construct
  source 1..21: mol_type = other RNA
  modified_base 1: mod_base = OTHER; note = 5' phosphate 2'-O-methyl uridine phosphorothioate
  modified_base 2: mod_base = OTHER; note = 2'-fluoro guanosine phosphorothioate
  modified_base 3: mod_base = OTHER; note = 2'-O-methyl uridine
  modified_base 4: mod_base = OTHER; note = 2'-fluoro cytosine
  modified_base 5: mod_base = OTHER; note = 2'-fluoro uridine
  modified_base 6: mod_base = OTHER; note = 2'-fluoro cytosine
  modified_base 7: mod_base = OTHER; note = 2'-O-methyl uridine
  modified_base 8: mod_base = OTHER; note = 2'-fluoro guanosine
  modified_base 9: mod_base = OTHER; note = 2'-O-methyl cytosine
  modified_base 10: mod_base = OTHER; note = 2'-fluoro guanosine
  modified_base 11: mod_base = OTHER; note = 2'-O-methyl guanosine
  modified_base 12: mod_base = OTHER; note = 2'-fluoro guanosine
  modified_base 13: mod_base = OTHER; note = 2'-O-methyl guanosine
  modified_base 14: mod_base = OTHER; note = 2'-fluoro cytosine phosphorothioate
  modified_base 15: mod_base = OTHER; note = 2'-O-methyl cytosine phosphorothioate
  modified_base 16: mod_base = OTHER; note = 2'-fluoro guanosine phosphorothioate
  modified_base 17: mod_base = OTHER; note = 2'-O-methyl guanosine phosphorothioate
  modified_base 18: mod_base = OTHER; note = 2'-O-methyl guanosine phosphorothioate
  modified_base 19: mod_base = OTHER; note = 2'-O-methyl guanosine phosphorothioate
  modified_base 20: mod_base = OTHER; note = 2'-fluoro guanosine phosphorothioate
  modified_base 21: mod_base = OTHER; note = 2'-O-methyl uridine
tgtctctgcggggccgggggt

SEQ ID NO: 888 - RNA, 21 nt, synthetic construct
  source 1..21: mol_type = other RNA
  modified_base 1: mod_base = OTHER; note = 5' phosphate 2'-O-methyl uridine phosphorothioate
  modified_base 2: mod_base = OTHER; note = 2'-fluoro uridine phosphorothioate
  modified_base 3: mod_base = OTHER; note = 2'-O-methyl cytosine
  modified_base 4: mod_base = OTHER; note = 2'-fluoro uridine
  modified_base 5: mod_base = OTHER; note = 2'-fluoro guanosine
  modified_base 6: mod_base = OTHER; note = 2'-fluoro uridine
  modified_base 7: mod_base = OTHER; note = 2'-O-methyl cytosine
  modified_base 8: mod_base = OTHER; note = 2'-fluoro uridine
  modified_base 9: mod_base = OTHER; note = 2'-O-methyl cytosine
  modified_base 10: mod_base = OTHER; note = 2'-fluoro uridine
  modified_base 11: mod_base = OTHER; note = 2'-O-methyl guanosine
  modified_base 12: mod_base = OTHER; note = 2'-fluoro cytosine
  modified_base 13: mod_base = OTHER; note = 2'-O-methyl guanosine
  modified_base 14: mod_base = OTHER; note = 2'-fluoro guanosine phosphorothioate
  modified_base 15: mod_base = OTHER; note = 2'-O-methyl guanosine phosphorothioate
  modified_base 16: mod_base = OTHER; note = 2'-fluoro guanosine phosphorothioate
  modified_base 17: mod_base = OTHER; note = 2'-O-methyl cytosine phosphorothioate
  modified_base 18: mod_base = OTHER; note = 2'-O-methyl cytosine phosphorothioate
  modified_base 19: mod_base = OTHER; note = 2'-O-methyl guanosine phosphorothioate
  modified_base 20: mod_base = OTHER; note = 2'-fluoro guanosine phosphorothioate
  modified_base 21: mod_base = OTHER; note = 2'-O-methyl uridine
ttctgtctctgcggggccggt

SEQ ID NO: 889 - RNA, 21 nt, synthetic construct
  source 1..21: mol_type = other RNA
  modified_base 1: mod_base = OTHER; note = 5' phosphate 2'-O-methyl uridine phosphorothioate
  modified_base 2: mod_base = OTHER; note = 2'-fluoro adenosine phosphorothioate
  modified_base 3: mod_base = OTHER; note = 2'-O-methyl cytosine
  modified_base 4: mod_base = OTHER; note = 2'-fluoro uridine
  modified_base 5: mod_base = OTHER; note = 2'-fluoro cytosine
  modified_base 6: mod_base = OTHER; note = 2'-fluoro uridine
  modified_base 7: mod_base = OTHER; note = 2'-O-methyl guanosine
  modified_base 8: mod_base = OTHER; note = 2'-fluoro uridine
  modified_base 9: mod_base = OTHER; note = 2'-O-methyl cytosine
  modified_base 10: mod_base = OTHER; note = 2'-fluoro uridine
  modified_base 11: mod_base = OTHER; note = 2'-O-methyl cytosine
  modified_base 12: mod_base = OTHER; note = 2'-fluoro uridine
  modified_base 13: mod_base = OTHER; note = 2'-O-methyl guanosine
  modified_base 14: mod_base = OTHER; note = 2'-fluoro cytosine phosphorothioate
  modified_base 15: mod_base = OTHER; note = 2'-O-methyl guanosine phosphorothioate
  modified_base 16: mod_base = OTHER; note = 2'-fluoro guanosine phosphorothioate
  modified_base 17: mod_base = OTHER; note = 2'-O-methyl guanosine phosphorothioate
  modified_base 18: mod_base = OTHER; note = 2'-O-methyl guanosine phosphorothioate
  modified_base 19: mod_base = OTHER; note = 2'-O-methyl cytosine phosphorothioate
  modified_base 20: mod_base = OTHER; note = 2'-fluoro cytosine phosphorothioate
  modified_base 21: mod_base = OTHER; note = 2'-O-methyl uridine
tactctgtctctgcggggcct

SEQ ID NO: 890 - RNA, 21 nt, synthetic construct
  source 1..21: mol_type = other RNA
  modified_base 1: mod_base = OTHER; note = 5' phosphate 2'-O-methyl uridine phosphorothioate
  modified_base 2: mod_base = OTHER; note = 2'-fluoro uridine phosphorothioate
  modified_base 3: mod_base = OTHER; note = 2'-O-methyl guanosine
  modified_base 4: mod_base = OTHER; note = 2'-fluoro guanosine
  modified_base 5: mod_base = OTHER; note = 2'-fluoro guanosine
  modified_base 6: mod_base = OTHER; note = 2'-fluoro uridine
  modified_base 7: mod_base = OTHER; note = 2'-O-methyl cytosine
  modified_base 8: mod_base = OTHER; note = 2'-fluoro adenosine
  modified_base 9: mod_base = OTHER; note = 2'-O-methyl cytosine
  modified_base 10: mod_base = OTHER; note = 2'-fluoro uridine
  modified_base 11: mod_base = OTHER; note = 2'-O-methyl cytosine
  modified_base 12: mod_base = OTHER; note = 2'-fluoro uridine
  modified_base 13: mod_base = OTHER; note = 2'-O-methyl guanosine
  modified_base 14: mod_base = OTHER; note = 2'-fluoro uridine phosphorothioate
  modified_base 15: mod_base = OTHER; note = 2'-O-methyl cytosine phosphorothioate
  modified_base 16: mod_base = OTHER; note = 2'-fluoro uridine phosphorothioate
  modified_base 17: mod_base = OTHER; note = 2'-O-methyl cytosine phosphorothioate
  modified_base 18: mod_base = OTHER; note = 2'-O-methyl uridine phosphorothioate
  modified_base 19: mod_base = OTHER; note = 2'-O-methyl guanosine phosphorothioate
  modified_base 20: mod_base = OTHER; note = 2'-fluoro cytosine phosphorothioate
  modified_base 21: mod_base = OTHER; note = 2'-O-methyl uridine
ttgggtcactctgtctctgct

SEQ ID NO: 891 - RNA, 21 nt, synthetic construct
  source 1..21: mol_type = other RNA
  modified_base 1: mod_base = OTHER; note = 5' phosphate 2'-O-methyl uridine phosphorothioate
  modified_base 2: mod_base = OTHER; note = 2'-fluoro cytosine phosphorothioate
  modified_base 3: mod_base = OTHER; note = 2'-O-methyl uridine
  modified_base 4: mod_base = OTHER; note = 2'-fluoro guanosine
  modified_base 5: mod_base = OTHER; note = 2'-fluoro guanosine
  modified_base 6: mod_base = OTHER; note = 2'-fluoro guanosine
  modified_base 7: mod_base = OTHER; note = 2'-O-methyl uridine
  modified_base 8: mod_base = OTHER; note = 2'-fluoro cytosine
  modified_base 9: mod_base = OTHER; note = 2'-O-methyl adenosine
  modified_base 10: mod_base = OTHER; note = 2'-fluoro cytosine
  modified_base 11: mod_base = OTHER; note = 2'-O-methyl uridine
  modified_base 12: mod_base = OTHER; note = 2'-fluoro cytosine
  modified_base 13: mod_base = OTHER; note = 2'-O-methyl uridine
  modified_base 14: mod_base = OTHER; note = 2'-fluoro guanosine phosphorothioate
  modified_base 15: mod_base = OTHER; note = 2'-O-methyl uridine phosphorothioate
  modified_base 16: mod_base = OTHER; note = 2'-fluoro cytosine phosphorothioate
  modified_base 17: mod_base = OTHER; note = 2'-O-methyl uridine phosphorothioate
  modified_base 18: mod_base = OTHER; note = 2'-O-methyl cytosine phosphorothioate
  modified_base 19: mod_base = OTHER; note = 2'-O-methyl uridine phosphorothioate
  modified_base 20: mod_base = OTHER; note = 2'-fluoro guanosine phosphorothioate
  modified_base 21: mod_base = OTHER; note = 2'-O-methyl uridine
tctgggtcactctgtctctgt

SEQ ID NO: 892 - RNA, 21 nt, synthetic construct
  source 1..21: mol_type = other RNA
  modified_base 1: mod_base = OTHER; note = 5' phosphate 2'-O-methyl uridine phosphorothioate
  modified_base 2: mod_base = OTHER; note = 2'-fluoro guanosine phosphorothioate
  modified_base 3: mod_base = OTHER; note = 2'-O-methyl cytosine
  modified_base 4: mod_base = OTHER; note = 2'-fluoro uridine
  modified_base 5: mod_base = OTHER; note = 2'-fluoro guanosine
  modified_base 6: mod_base = OTHER; note = 2'-fluoro guanosine
  modified_base 7: mod_base = OTHER; note = 2'-O-methyl guanosine
  modified_base 8: mod_base = OTHER; note = 2'-fluoro uridine
  modified_base 9: mod_base = OTHER; note = 2'-O-methyl cytosine
  modified_base 10: mod_base = OTHER; note = 2'-fluoro adenosine
  modified_base 11: mod_base = OTHER; note = 2'-O-methyl cytosine
  modified_base 12: mod_base = OTHER; note = 2'-fluoro uridine
  modified_base 13: mod_base = OTHER; note = 2'-O-methyl cytosine
  modified_base 14: mod_base = OTHER; note = 2'-fluoro uridine phosphorothioate
  modified_base 15: mod_base = OTHER; note = 2'-O-methyl guanosine phosphorothioate
  modified_base 16: mod_base = OTHER; note = 2'-fluoro uridine phosphorothioate
  modified_base 17: mod_base = OTHER; note = 2'-O-methyl cytosine phosphorothioate
  modified_base 18: mod_base = OTHER; note = 2'-O-methyl uridine phosphorothioate
  modified_base 19: mod_base = OTHER; note = 2'-O-methyl cytosine phosphorothioate
  modified_base 20: mod_base = OTHER; note = 2'-fluoro uridine phosphorothioate
  modified_base 21: mod_base = OTHER; note = 2'-O-methyl uridine
tgctgggtcactctgtctctt

SEQ ID NO: 893 - RNA, 21 nt, synthetic construct
  source 1..21: mol_type = other RNA
  modified_base 1: mod_base = OTHER; note = 5' phosphate 2'-O-methyl uridine phosphorothioate
  modified_base 2: mod_base = OTHER; note = 2'-fluoro guanosine phosphorothioate
  modified_base 3: mod_base = OTHER; note = 2'-O-methyl uridine
  modified_base 4: mod_base = OTHER; note = 2'-fluoro uridine
  modified_base 5: mod_base = OTHER; note = 2'-fluoro guanosine
  modified_base 6: mod_base = OTHER; note = 2'-fluoro cytosine
  modified_base 7: mod_base = OTHER; note = 2'-O-methyl uridine
  modified_base 8: mod_base = OTHER; note = 2'-fluoro guanosine
  modified_base 9: mod_base = OTHER; note = 2'-O-methyl guanosine
  modified_base 10: mod_base = OTHER; note = 2'-fluoro guanosine
  modified_base 11: mod_base = OTHER; note = 2'-O-methyl uridine
  modified_base 12: mod_base = OTHER; note = 2'-fluoro cytosine
  modified_base 13: mod_base = OTHER; note = 2'-O-methyl adenosine
  modified_base 14: mod_base = OTHER; note = 2'-fluoro cytosine phosphorothioate
  modified_base 15: mod_base = OTHER; note = 2'-O-methyl uridine phosphorothioate
  modified_base 16: mod_base = OTHER; note = 2'-fluoro cytosine phosphorothioate
  modified_base 17: mod_base = OTHER; note = 2'-O-methyl uridine phosphorothioate
  modified_base 18: mod_base = OTHER; note = 2'-O-methyl guanosine phosphorothioate
  modified_base 19: mod_base = OTHER; note = 2'-O-methyl uridine phosphorothioate
  modified_base 20: mod_base = OTHER; note = 2'-fluoro cytosine phosphorothioate
  modified_base 21: mod_base = OTHER; note = 2'-O-methyl uridine
tgttgctgggtcactctgtct

SEQ ID NO: 894 - RNA, 21 nt, synthetic construct
  source 1..21: mol_type = other RNA
  modified_base 1: mod_base = OTHER; note = 5' phosphate 2'-O-methyl uridine phosphorothioate
  modified_base 2: mod_base = OTHER; note = 2'-fluoro guanosine phosphorothioate
  modified_base 3: mod_base = OTHER; note = 2'-O-methyl guanosine
  modified_base 4: mod_base = OTHER; note = 2'-fluoro uridine
  modified_base 5: mod_base = OTHER; note = 2'-fluoro uridine
  modified_base 6: mod_base = OTHER; note = 2'-fluoro guanosine
  modified_base 7: mod_base = OTHER; note = 2'-O-methyl cytosine
  modified_base 8: mod_base = OTHER; note = 2'-fluoro uridine
  modified_base 9: mod_base = OTHER; note = 2'-O-methyl guanosine
  modified_base 10: mod_base = OTHER; note = 2'-fluoro guanosine
  modified_base 11: mod_base = OTHER; note = 2'-O-methyl guanosine
  modified_base 12: mod_base = OTHER; note = 2'-fluoro uridine
  modified_base 13: mod_base = OTHER; note = 2'-O-methyl cytosine
  modified_base 14: mod_base = OTHER; note = 2'-fluoro adenosine phosphorothioate
  modified_base 15: mod_base = OTHER; note = 2'-O-methyl cytosine phosphorothioate
  modified_base 16: mod_base = OTHER; note = 2'-fluoro uridine phosphorothioate
  modified_base 17: mod_base = OTHER; note = 2'-O-methyl cytosine phosphorothioate
  modified_base 18: mod_base = OTHER; note = 2'-O-methyl uridine phosphorothioate
  modified_base 19: mod_base = OTHER; note = 2'-O-methyl guanosine phosphorothioate
  modified_base 20: mod_base = OTHER; note = 2'-fluoro uridine phosphorothioate
  modified_base 21: mod_base = OTHER; note = 2'-O-methyl uridine
tggttgctgggtcactctgtt

SEQ ID NO: 895 - RNA, 21 nt, synthetic construct
  source 1..21: mol_type = other RNA
  modified_base 1: mod_base = OTHER; note = 5' phosphate 2'-O-methyl uridine phosphorothioate
  modified_base 2: mod_base = OTHER; note = 2'-fluoro guanosine phosphorothioate
  modified_base 3: mod_base = OTHER; note = 2'-O-methyl guanosine
  modified_base 4: mod_base = OTHER; note = 2'-fluoro guanosine
  modified_base 5: mod_base = OTHER; note = 2'-fluoro uridine
  modified_base 6: mod_base = OTHER; note = 2'-fluoro uridine
  modified_base 7: mod_base = OTHER; note = 2'-O-methyl guanosine
  modified_base 8: mod_base = OTHER; note = 2'-fluoro cytosine
  modified_base 9: mod_base = OTHER; note = 2'-O-methyl uridine
  modified_base 10: mod_base = OTHER; note = 2'-fluoro guanosine
  modified_base 11: mod_base = OTHER; note = 2'-O-methyl guanosine
  modified_base 12: mod_base = OTHER; note = 2'-fluoro guanosine
  modified_base 13: mod_base = OTHER; note = 2'-O-methyl uridine
  modified_base 14: mod_base = OTHER; note = 2'-fluoro cytosine phosphorothioate
  modified_base 15: mod_base = OTHER; note = 2'-O-methyl adenosine phosphorothioate
  modified_base 16: mod_base = OTHER; note = 2'-fluoro cytosine phosphorothioate
  modified_base 17: mod_base = OTHER; note = 2'-O-methyl uridine phosphorothioate
  modified_base 18: mod_base = OTHER; note = 2'-O-methyl cytosine phosphorothioate
  modified_base 19: mod_base = OTHER; note = 2'-O-methyl uridine phosphorothioate
  modified_base 20: mod_base = OTHER; note = 2'-fluoro guanosine phosphorothioate
  modified_base 21: mod_base = OTHER; note = 2'-O-methyl uridine
tgggttgctgggtcactctgt

SEQ ID NO: 896 - RNA, 21 nt, synthetic construct
  source 1..21: mol_type = other RNA
  modified_base 1: mod_base = OTHER; note = 5' phosphate 2'-O-methyl uridine phosphorothioate
  modified_base 2: mod_base = OTHER; note = 2'-fluoro uridine phosphorothioate
  modified_base 3: mod_base = OTHER; note = 2'-O-methyl cytosine
  modified_base 4: mod_base = OTHER; note = 2'-fluoro uridine
  modified_base 5: mod_base = OTHER; note = 2'-fluoro guanosine
  modified_base 6: mod_base = OTHER; note = 2'-fluoro guanosine
  modified_base 7: mod_base = OTHER; note = 2'-O-methyl guanosine
  modified_base 8: mod_base = OTHER; note = 2'-fluoro uridine
  modified_base 9: mod_base = OTHER; note = 2'-O-methyl uridine
  modified_base 10: mod_base = OTHER; note = 2'-fluoro guanosine
  modified_base 11: mod_base = OTHER; note = 2'-O-methyl cytosine
  modified_base 12: mod_base = OTHER; note = 2'-fluoro uridine
  modified_base 13: mod_base = OTHER; note = 2'-O-methyl guanosine
  modified_base 14: mod_base = OTHER; note = 2'-fluoro guanosine phosphorothioate
  modified_base 15: mod_base = OTHER; note = 2'-O-methyl guanosine phosphorothioate
  modified_base 16: mod_base = OTHER; note = 2'-fluoro uridine phosphorothioate
  modified_base 17: mod_base = OTHER; note = 2'-O-methyl cytosine phosphorothioate
  modified_base 18: mod_base = OTHER; note = 2'-O-methyl adenosine phosphorothioate
  modified_base 19: mod_base = OTHER; note = 2'-O-methyl cytosine phosphorothioate
  modified_base 20: mod_base = OTHER; note = 2'-fluoro uridine phosphorothioate
  modified_base 21: mod_base = OTHER; note = 2'-O-methyl uridine
ttctgggttgctgggtcactt

SEQ ID NO: 897 - RNA, 21 nt, synthetic construct
  source 1..21: mol_type = other RNA
  modified_base 1: mod_base = OTHER; note = 5' phosphate 2'-O-methyl uridine phosphorothioate
  modified_base 2: mod_base = OTHER; note = 2'-fluoro uridine phosphorothioate
  modified_base 3: mod_base = OTHER; note = 2'-O-methyl cytosine
  modified_base 4: mod_base = OTHER; note = 2'-fluoro adenosine
  modified_base 5: mod_base = OTHER; note = 2'-fluoro uridine
  modified_base 6: mod_base = OTHER; note = 2'-fluoro guanosine
  modified_base 7: mod_base = OTHER; note = 2'-O-methyl guanosine
  modified_base 8: mod_base = OTHER; note = 2'-fluoro guanosine
  modified_base 9: mod_base = OTHER; note = 2'-O-methyl cytosine
  modified_base 10: mod_base = OTHER; note = 2'-fluoro uridine
  modified_base 11: mod_base = OTHER; note = 2'-O-methyl cytosine
  modified_base 12: mod_base = OTHER; note = 2'-fluoro uridine
  modified_base 13: mod_base = OTHER; note = 2'-O-methyl guanosine
  modified_base 14: mod_base = OTHER; note = 2'-fluoro guanosine phosphorothioate
  modified_base 15: mod_base = OTHER; note = 2'-O-methyl guanosine phosphorothioate
  modified_base 16: mod_base = OTHER; note = 2'-fluoro uridine phosphorothioate
  modified_base 17: mod_base = OTHER; note = 2'-O-methyl uridine phosphorothioate
  modified_base 18: mod_base = OTHER; note = 2'-O-methyl guanosine phosphorothioate
  modified_base 19: mod_base = OTHER; note = 2'-O-methyl cytosine phosphorothioate
  modified_base 20: mod_base = OTHER; note = 2'-fluoro uridine phosphorothioate
  modified_base 21: mod_base = OTHER; note = 2'-O-methyl uridine
ttcatgggctctgggttgctt

SEQ ID NO: 898 - RNA, 21 nt, synthetic construct
  source 1..21: mol_type = other RNA
  modified_base 1: mod_base = OTHER; note = 5' phosphate 2'-O-methyl uridine phosphorothioate
  modified_base 2: mod_base = OTHER; note = 2'-fluoro cytosine phosphorothioate
  modified_base 3: mod_base = OTHER; note = 2'-O-methyl uridine
  modified_base 4: mod_base = OTHER; note = 2'-fluoro cytosine
  modified_base 5: mod_base = OTHER; note = 2'-fluoro adenosine
  modified_base 6: mod_base = OTHER; note = 2'-fluoro uridine
  modified_base 7: mod_base = OTHER; note = 2'-O-methyl guanosine
  modified_base 8: mod_base = OTHER; note = 2'-fluoro guanosine
  modified_base 9: mod_base = OTHER; note = 2'-O-methyl guanosine
  modified_base 10: mod_base = OTHER; note = 2'-fluoro cytosine
  modified_base 11: mod_base = OTHER; note = 2'-O-methyl uridine
  modified_base 12: mod_base = OTHER; note = 2'-fluoro cytosine
  modified_base 13: mod_base = OTHER; note = 2'-O-methyl uridine
  modified_base 14: mod_base = OTHER; note = 2'-fluoro guanosine phosphorothioate
  modified_base 15: mod_base = OTHER; note = 2'-O-methyl guanosine phosphorothioate
  modified_base 16: mod_base = OTHER; note = 2'-fluoro guanosine phosphorothioate
  modified_base 17: mod_base = OTHER; note = 2'-O-methyl uridine phosphorothioate
  modified_base 18: mod_base = OTHER; note = 2'-O-methyl uridine phosphorothioate
  modified_base 19: mod_base = OTHER; note = 2'-O-methyl guanosine phosphorothioate
  modified_base 20: mod_base = OTHER; note = 2'-fluoro cytosine phosphorothioate
  modified_base 21: mod_base = OTHER; note = 2'-O-methyl uridine
tctcatgggctctgggttgct

SEQ ID NO: 899 - RNA, 21 nt, synthetic construct
  source 1..21: mol_type = other RNA
  modified_base 1: mod_base = OTHER; note = 5' phosphate 2'-O-methyl uridine phosphorothioate
  modified_base 2: mod_base = OTHER; note = 2'-fluoro cytosine phosphorothioate
  modified_base 3: mod_base = OTHER; note = 2'-O-methyl cytosine
  modified_base 4: mod_base = OTHER; note = 2'-fluoro cytosine
  modified_base 5: mod_base = OTHER; note = 2'-fluoro uridine
  modified_base 6: mod_base = OTHER; note = 2'-fluoro cytosine
  modified_base 7: mod_base = OTHER; note = 2'-O-methyl adenosine
  modified_base 8: mod_base = OTHER; note = 2'-fluoro uridine
  modified_base 9: mod_base = OTHER; note = 2'-O-methyl guanosine
  modified_base 10: mod_base = OTHER; note = 2'-fluoro guanosine
  modified_base 11: mod_base = OTHER; note = 2'-O-methyl guanosine
  modified_base 12: mod_base = OTHER; note = 2'-fluoro cytosine
  modified_base 13: mod_base = OTHER; note = 2'-O-methyl uridine
  modified_base 14: mod_base = OTHER; note = 2'-fluoro cytosine phosphorothioate
  modified_base 15: mod_base = OTHER; note = 2'-O-methyl uridine phosphorothioate
  modified_base 16: mod_base = OTHER; note = 2'-fluoro guanosine phosphorothioate
  modified_base 17: mod_base = OTHER; note = 2'-O-methyl guanosine phosphorothioate
  modified_base 18: mod_base = OTHER; note = 2'-O-methyl guanosine phosphorothioate
  modified_base 19: mod_base = OTHER; note = 2'-O-methyl uridine phosphorothioate
  modified_base 20: mod_base = OTHER; note = 2'-fluoro uridine phosphorothioate
  modified_base 21: mod_base = OTHER; note = 2'-O-methyl uridine
tccctcatgggctctgggttt

SEQ ID NO: 900 - RNA, 21 nt, synthetic construct
  source 1..21: mol_type = other RNA
  modified_base 1: mod_base = OTHER; note = 5' phosphate 2'-O-methyl uridine phosphorothioate
  modified_base 2: mod_base = OTHER; note = 2'-fluoro uridine phosphorothioate
  modified_base 3: mod_base = OTHER; note = 2'-O-methyl cytosine
  modified_base 4: mod_base = OTHER; note = 2'-fluoro cytosine
  modified_base 5: mod_base = OTHER; note = 2'-fluoro cytosine
  modified_base 6: mod_base = OTHER; note = 2'-fluoro uridine
  modified_base 7: mod_base = OTHER; note = 2'-O-methyl cytosine
  modified_base 8: mod_base = OTHER; note = 2'-fluoro adenosine
  modified_base 9: mod_base = OTHER; note = 2'-O-methyl uridine
  modified_base 10: mod_base = OTHER; note = 2'-fluoro guanosine
  modified_base 11: mod_base = OTHER; note = 2'-O-methyl guanosine
  modified_base 12: mod_base = OTHER; note = 2'-fluoro guanosine
  modified_base 13: mod_base = OTHER; note = 2'-O-methyl cytosine
  modified_base 14: mod_base = OTHER; note = 2'-fluoro uridine phosphorothioate
  modified_base 15: mod_base = OTHER; note = 2'-O-methyl cytosine phosphorothioate
  modified_base 16: mod_base = OTHER; note = 2'-fluoro uridine phosphorothioate
  modified_base 17: mod_base = OTHER; note = 2'-O-methyl guanosine phosphorothioate
  modified_base 18: mod_base = OTHER; note = 2'-O-methyl guanosine phosphorothioate
  modified_base 19: mod_base = OTHER; note = 2'-O-methyl guanosine phosphorothioate
  modified_base 20: mod_base = OTHER; note = 2'-fluoro uridine phosphorothioate
  modified_base 21: mod_base = OTHER; note = 2'-O-methyl uridine
ttccctcatgggctctgggtt

SEQ ID NO: 901 - RNA, 21 nt, synthetic construct
  source 1..21: mol_type = other RNA
  modified_base 1: mod_base = OTHER; note = 5' phosphate 2'-O-methyl uridine phosphorothioate
  modified_base 2: mod_base = OTHER; note = 2'-fluoro guanosine phosphorothioate
  modified_base 3: mod_base = OTHER; note = 2'-O-methyl uridine
  modified_base 4: mod_base = OTHER; note = 2'-fluoro cytosine
  modified_base 5: mod_base = OTHER; note = 2'-fluoro cytosine
  modified_base 6: mod_base = OTHER; note = 2'-fluoro cytosine
  modified_base 7: mod_base = OTHER; note = 2'-O-methyl uridine
  modified_base 8: mod_base = OTHER; note = 2'-fluoro cytosine
  modified_base 9: mod_base = OTHER; note = 2'-O-methyl adenosine
  modified_base 10: mod_base = OTHER; note = 2'-fluoro uridine
  modified_base 11: mod_base = OTHER; note = 2'-O-methyl guanosine
  modified_base 12: mod_base = OTHER; note = 2'-fluoro guanosine
  modified_base 13: mod_base = OTHER; note = 2'-O-methyl guanosine
  modified_base 14: mod_base = OTHER; note = 2'-fluoro cytosine phosphorothioate
  modified_base 15: mod_base = OTHER; note = 2'-O-methyl uridine phosphorothioate
  modified_base 16: mod_base = OTHER; note = 2'-fluoro cytosine phosphorothioate
  modified_base 17: mod_base = OTHER; note = 2'-O-methyl uridine phosphorothioate
  modified_base 18: mod_base = OTHER; note = 2'-O-methyl guanosine phosphorothioate
  modified_base 19: mod_base = OTHER; note = 2'-O-methyl guanosine phosphorothioate
  modified_base 20: mod_base = OTHER; note = 2'-fluoro guanosine phosphorothioate
  modified_base 21: mod_base = OTHER; note = 2'-O-methyl uridine
tgtccctcatgggctctgggt

SEQ ID NO: 902 - RNA, 21 nt, synthetic construct
  source 1..21: mol_type = other RNA
  modified_base 1: mod_base = OTHER; note = 5' phosphate 2'-O-methyl uridine phosphorothioate
  modified_base 2: mod_base = OTHER; note = 2'-fluoro adenosine phosphorothioate
  modified_base 3: mod_base = OTHER; note = 2'-O-methyl cytosine
  modified_base 4: mod_base = OTHER; note = 2'-fluoro adenosine
  modified_base 5: mod_base = OTHER; note = 2'-fluoro uridine
  modified_base 6: mod_base = OTHER; note = 2'-fluoro cytosine
  modified_base 7: mod_base = OTHER; note = 2'-O-methyl cytosine
  modified_base 8: mod_base = OTHER; note = 2'-fluoro adenosine
  modified_base 9: mod_base = OTHER; note = 2'-O-methyl guanosine
  modified_base 10: mod_base = OTHER; note = 2'-fluoro adenosine
  modified_base 11: mod_base = OTHER; note = 2'-O-methyl uridine
  modified_base 12: mod_base = OTHER; note = 2'-fluoro cytosine
  modified_base 13: mod_base = OTHER; note = 2'-O-methyl guanosine
  modified_base 14: mod_base = OTHER; note = 2'-fluoro guanosine phosphorothioate
  modified_base 15: mod_base = OTHER; note = 2'-O-methyl adenosine phosphorothioate
  modified_base 16: mod_base = OTHER; note = 2'-fluoro adenosine phosphorothioate
  modified_base 17: mod_base = OTHER; note = 2'-O-methyl adenosine phosphorothioate
  modified_base 18: mod_base = OTHER; note = 2'-O-methyl uridine phosphorothioate
  modified_base 19: mod_base = OTHER; note = 2'-O-methyl adenosine phosphorothioate
  modified_base 20: mod_base = OTHER; note = 2'-fluoro guanosine phosphorothioate
  modified_base 21: mod_base = OTHER; note = 2'-O-methyl uridine
tacatccagatcggaaatagt

SEQ ID NO: 903 - RNA, 21 nt, synthetic construct
  source 1..21: mol_type = other RNA
  modified_base 1: mod_base = OTHER; note = 5' phosphate 2'-O-methyl uridine phosphorothioate
  modified_base 2: mod_base = OTHER; note = 2'-fluoro cytosine phosphorothioate
  modified_base 3: mod_base = OTHER; note = 2'-O-methyl adenosine
  modified_base 4: mod_base = OTHER; note = 2'-fluoro cytosine
  modified_base 5: mod_base = OTHER; note = 2'-fluoro adenosine
  modified_base 6: mod_base = OTHER; note = 2'-fluoro uridine
  modified_base 7: mod_base = OTHER; note = 2'-O-methyl cytosine
  modified_base 8: mod_base = OTHER; note = 2'-fluoro cytosine
  modified_base 9: mod_base = OTHER; note = 2'-O-methyl adenosine
  modified_base 10: mod_base = OTHER; note = 2'-fluoro guanosine
  modified_base 11: mod_base = OTHER; note = 2'-O-methyl adenosine
  modified_base 12: mod_base = OTHER; note = 2'-fluoro uridine
  modified_base 13: mod_base = OTHER; note = 2'-O-methyl cytosine
  modified_base 14: mod_base = OTHER; note = 2'-fluoro guanosine phosphorothioate
  modified_base 15: mod_base = OTHER; note = 2'-O-methyl guanosine phosphorothioate
  modified_base 16: mod_base = OTHER; note = 2'-fluoro adenosine phosphorothioate
  modified_base 17: mod_base = OTHER; note = 2'-O-methyl adenosine phosphorothioate
  modified_base 18: mod_base = OTHER; note = 2'-O-methyl adenosine phosphorothioate
  modified_base 19: mod_base = OTHER; note = 2'-O-methyl uridine phosphorothioate
  modified_base 20: mod_base = OTHER; note = 2'-fluoro adenosine phosphorothioate
  modified_base 21: mod_base = OTHER; note = 2'-O-methyl uridine
tcacatccagatcggaaatat

SEQ ID NO: 904 - RNA, 21 nt, synthetic construct
  source 1..21: mol_type = other RNA
  modified_base 1: mod_base = OTHER; note = 5' phosphate 2'-O-methyl uridine phosphorothioate
  modified_base 2: mod_base = OTHER; note = 2'-fluoro adenosine phosphorothioate
  modified_base 3: mod_base = OTHER; note = 2'-O-methyl cytosine
  modified_base 4: mod_base = OTHER; note = 2'-fluoro adenosine
  modified_base 5: mod_base = OTHER; note = 2'-fluoro cytosine
  modified_base 6: mod_base = OTHER; note = 2'-fluoro adenosine
  modified_base 7: mod_base = OTHER; note = 2'-O-methyl uridine
  modified_base 8: mod_base = OTHER; note = 2'-fluoro cytosine
  modified_base 9: mod_base = OTHER; note = 2'-O-methyl cytosine
  modified_base 10: mod_base = OTHER; note = 2'-fluoro adenosine
  modified_base 11: mod_base = OTHER; note = 2'-O-methyl guanosine
  modified_base 12: mod_base = OTHER; note = 2'-fluoro adenosine
  modified_base 13: mod_base = OTHER; note = 2'-O-methyl uridine
  modified_base 14: mod_base = OTHER; note = 2'-fluoro cytosine phosphorothioate
  modified_base 15: mod_base = OTHER; note = 2'-O-methyl guanosine phosphorothioate
  modified_base 16: mod_base = OTHER; note = 2'-fluoro guanosine phosphorothioate
  modified_base 17: mod_base = OTHER; note = 2'-O-methyl adenosine phosphorothioate
  modified_base 18: mod_base = OTHER; note = 2'-O-methyl adenosine phosphorothioate
  modified_base 19: mod_base = OTHER; note = 2'-O-methyl adenosine phosphorothioate
  modified_base 20: mod_base = OTHER; note = 2'-fluoro uridine phosphorothioate
  modified_base 21: mod_base = OTHER; note = 2'-O-methyl uridine
tacacatccagatcggaaatt

SEQ ID NO: 905 - RNA, 21 nt, synthetic construct
  source 1..21: mol_type = other RNA
  modified_base 1: mod_base = OTHER; note = 5' phosphate 2'-O-methyl uridine phosphorothioate
  modified_base 2: mod_base = OTHER; note = 2'-fluoro guanosine phosphorothioate
  modified_base 3: mod_base = OTHER; note = 2'-O-methyl adenosine
  modified_base 4: mod_base = OTHER; note = 2'-fluoro cytosine
  modified_base 5: mod_base = OTHER; note = 2'-fluoro adenosine
  modified_base 6: mod_base = OTHER; note = 2'-fluoro cytosine
  modified_base 7: mod_base = OTHER; note = 2'-O-methyl adenosine
  modified_base 8: mod_base = OTHER; note = 2'-fluoro uridine
  modified_base 9: mod_base = OTHER; note = 2'-O-methyl cytosine
  modified_base 10: mod_base = OTHER; note = 2'-fluoro cytosine
  modified_base 11: mod_base = OTHER; note = 2'-O-methyl adenosine
  modified_base 12: mod_base = OTHER; note = 2'-fluoro guanosine
  modified_base 13: mod_base = OTHER; note = 2'-O-methyl adenosine
  modified_base 14: mod_base = OTHER; note = 2'-fluoro uridine phosphorothioate
  modified_base 15: mod_base = OTHER; note = 2'-O-methyl cytosine phosphorothioate
  modified_base 16: mod_base = OTHER; note = 2'-fluoro guanosine phosphorothioate
  modified_base 17: mod_base = OTHER; note = 2'-O-methyl guanosine phosphorothioate
  modified_base 18: mod_base = OTHER; note = 2'-O-methyl adenosine phosphorothioate
  modified_base 19: mod_base = OTHER; note = 2'-O-methyl adenosine phosphorothioate
  modified_base 20: mod_base = OTHER; note = 2'-fluoro adenosine phosphorothioate
  modified_base 21: mod_base = OTHER; note = 2'-O-methyl uridine
tgacacatccagatcggaaat

SEQ ID NO: 906 - RNA, 21 nt, synthetic construct
  source 1..21: mol_type = other RNA
  modified_base 1: mod_base = OTHER; note = 5' phosphate 2'-O-methyl uridine phosphorothioate
  modified_base 2: mod_base = OTHER; note = 2'-fluoro guanosine phosphorothioate
  modified_base 3: mod_base = OTHER; note = 2'-O-methyl guanosine
  modified_base 4: mod_base = OTHER; note = 2'-fluoro guanosine
  modified_base 5: mod_base = OTHER; note = 2'-fluoro adenosine
  modified_base 6: mod_base = OTHER; note = 2'-fluoro cytosine
  modified_base 7: mod_base = OTHER; note = 2'-O-methyl adenosine
  modified_base 8: mod_base = OTHER; note = 2'-fluoro cytosine
  modified_base 9: mod_base = OTHER; note = 2'-O-methyl adenosine
  modified_base 10: mod_base = OTHER; note = 2'-fluoro uridine
  modified_base 11: mod_base = OTHER; note = 2'-O-methyl cytosine
  modified_base 12: mod_base = OTHER; note = 2'-fluoro cytosine
  modified_base 13: mod_base = OTHER; note = 2'-O-methyl adenosine
  modified_base 14: mod_base = OTHER; note = 2'-fluoro guanosine phosphorothioate
  modified_base 15: mod_base = OTHER; note = 2'-O-methyl adenosine phosphorothioate
  modified_base 16: mod_base = OTHER; note = 2'-fluoro uridine phosphorothioate
  modified_base 17: mod_base = OTHER; note = 2'-O-methyl cytosine phosphorothioate
  modified_base 18: mod_base = OTHER; note = 2'-O-methyl guanosine phosphorothioate
  modified_base 19: mod_base = OTHER; note = 2'-O-methyl guanosine phosphorothioate
  modified_base 20: mod_base = OTHER; note = 2'-fluoro adenosine phosphorothioate
  modified_base 21: mod_base = OTHER; note = 2'-O-methyl uridine
tgggacacatccagatcggat

SEQ ID NO: 907 - RNA, 21 nt, synthetic construct
  source 1..21: mol_type = other RNA
  modified_base 1: mod_base = OTHER; note = 5' phosphate 2'-O-methyl uridine phosphorothioate
  modified_base 2: mod_base = OTHER; note = 2'-fluoro uridine phosphorothioate
  modified_base 3: mod_base = OTHER; note = 2'-O-methyl guanosine
  modified_base 4: mod_base = OTHER; note = 2'-fluoro guanosine
  modified_base 5: mod_base = OTHER; note = 2'-fluoro guanosine
  modified_base 6: mod_base = OTHER; note = 2'-fluoro adenosine
  modified_base 7: mod_base = OTHER; note = 2'-O-methyl cytosine
  modified_base 8: mod_base = OTHER; note = 2'-fluoro adenosine
  modified_base 9: mod_base = OTHER; note = 2'-O-methyl cytosine
  modified_base 10: mod_base = OTHER; note = 2'-fluoro adenosine
  modified_base 11: mod_base = OTHER; note = 2'-O-methyl uridine
  modified_base 12: mod_base = OTHER; note = 2'-fluoro cytosine
  modified_base 13: mod_base = OTHER; note = 2'-O-methyl cytosine
  modified_base 14: mod_base = OTHER; note = 2'-fluoro adenosine phosphorothioate
  modified_base 15: mod_base = OTHER; note = 2'-O-methyl guanosine phosphorothioate
  modified_base 16: mod_base = OTHER; note = 2'-fluoro adenosine phosphorothioate
  modified_base 17: mod_base = OTHER; note = 2'-O-methyl uridine phosphorothioate
  modified_base 18: mod_base = OTHER; note = 2'-O-methyl cytosine phosphorothioate
  modified_base 19: mod_base = OTHER; note = 2'-O-methyl guanosine phosphorothioate
  modified_base 20: mod_base = OTHER; note = 2'-fluoro guanosine phosphorothioate
  modified_base 21: mod_base = OTHER; note = 2'-O-methyl uridine
ttgggacacatccagatcggt

SEQ ID NO: 908 - RNA, 21 nt, synthetic construct
  source 1..21: mol_type = other RNA
  modified_base 1: mod_base = OTHER; note = 5' phosphate 2'-O-methyl uridine phosphorothioate
  modified_base 2: mod_base = OTHER; note = 2'-fluoro uridine phosphorothioate
  modified_base 3: mod_base = OTHER; note = 2'-O-methyl cytosine
  modified_base 4: mod_base = OTHER; note = 2'-fluoro uridine
  modified_base 5: mod_base = OTHER; note = 2'-fluoro guanosine
  modified_base 6: mod_base = OTHER; note = 2'-fluoro guanosine
  modified_base 7: mod_base = OTHER; note = 2'-O-methyl guanosine
  modified_base 8: mod_base = OTHER; note = 2'-fluoro adenosine
  modified_base 9: mod_base = OTHER; note = 2'-O-methyl cytosine
  modified_base 10: mod_base = OTHER; note = 2'-fluoro adenosine
  modified_base 11: mod_base = OTHER; note = 2'-O-methyl cytosine
  modified_base 12: mod_base = OTHER; note = 2'-fluoro adenosine
  modified_base 13: mod_base = OTHER; note = 2'-O-methyl uridine
  modified_base 14: mod_base = OTHER; note = 2'-fluoro cytosine phosphorothioate
  modified_base 15: mod_base = OTHER; note = 2'-O-methyl cytosine phosphorothioate
  modified_base 16: mod_base = OTHER; note = 2'-fluoro adenosine phosphorothioate
  modified_base 17: mod_base = OTHER; note = 2'-O-methyl guanosine phosphorothioate
  modified_base 18: mod_base = OTHER; note = 2'-O-methyl adenosine phosphorothioate
  modified_base 19: mod_base = OTHER; note = 2'-O-methyl uridine phosphorothioate
  modified_base 20: mod_base = OTHER; note = 2'-fluoro cytosine phosphorothioate
  modified_base 21: mod_base = OTHER; note = 2'-O-methyl uridine
ttctgggacacatccagatct

SEQ ID NO: 909 - RNA, 21 nt, synthetic construct
  source 1..21: mol_type = other RNA
  modified_base 1: mod_base = OTHER; note = 5' phosphate 2'-O-methyl uridine phosphorothioate
  modified_base 2: mod_base = OTHER; note = 2'-fluoro cytosine phosphorothioate
  modified_base 3: mod_base = OTHER; note = 2'-O-methyl cytosine
  modified_base 4: mod_base = OTHER; note = 2'-fluoro adenosine
  modified_base 5: mod_base = OTHER; note = 2'-fluoro uridine
  modified_base 6: mod_base = OTHER; note = 2'-fluoro cytosine
  modified_base 7: mod_base = OTHER; note = 2'-O-methyl uridine
  modified_base 8: mod_base = OTHER; note = 2'-fluoro guanosine
  modified_base 9: mod_base = OTHER; note = 2'-O-methyl guanosine
  modified_base 10: mod_base = OTHER; note = 2'-fluoro guanosine
  modified_base 11: mod_base = OTHER; note = 2'-O-methyl adenosine
  modified_base 12: mod_base = OTHER; note = 2'-fluoro cytosine
  modified_base 13: mod_base = OTHER; note = 2'-O-methyl adenosine
  modified_base 14: mod_base = OTHER; note = 2'-fluoro cytosine phosphorothioate
  modified_base 15: mod_base = OTHER; note = 2'-O-methyl adenosine phosphorothioate
  modified_base 16: mod_base = OTHER; note = 2'-fluoro uridine phosphorothioate
  modified_base 17: mod_base = OTHER; note = 2'-O-methyl cytosine phosphorothioate
  modified_base 18: mod_base = OTHER; note = 2'-O-methyl cytosine phosphorothioate
  modified_base 19: mod_base = OTHER; note = 2'-O-methyl adenosine phosphorothioate
  modified_base 20: mod_base = OTHER; note = 2'-fluoro guanosine phosphorothioate
  modified_base 21: mod_base = OTHER; note = 2'-O-methyl uridine
tccatctgggacacatccagt

SEQ ID NO: 910 - RNA, 21 nt, synthetic construct
  source 1..21: mol_type = other RNA
  modified_base 1: mod_base = OTHER; note = 5' phosphate 2'-O-methyl uridine phosphorothioate
  modified_base 2: mod_base = OTHER; note = 2'-fluoro guanosine phosphorothioate
  modified_base 3: mod_base = OTHER; note = 2'-O-methyl cytosine
  modified_base 4: mod_base = OTHER; note = 2'-fluoro cytosine
  modified_base 5: mod_base = OTHER; note = 2'-fluoro adenosine
  modified_base 6: mod_base = OTHER; note = 2'-fluoro uridine
  modified_base 7: mod_base = OTHER; note = 2'-O-methyl cytosine
  modified_base 8: mod_base = OTHER; note = 2'-fluoro uridine
  modified_base 9: mod_base = OTHER; note = 2'-O-methyl guanosine
  modified_base 10: mod_base = OTHER; note = 2'-fluoro guanosine
  modified_base 11: mod_base = OTHER; note = 2'-O-methyl guanosine
  modified_base 12: mod_base = OTHER; note = 2'-fluoro adenosine
  modified_base 13: mod_base = OTHER; note = 2'-O-methyl cytosine
  modified_base 14: mod_base = OTHER; note = 2'-fluoro adenosine phosphorothioate
  modified_base 15: mod_base = OTHER; note = 2'-O-methyl cytosine phosphorothioate
  modified_base 16: mod_base = OTHER; note = 2'-fluoro adenosine phosphorothioate
  modified_base 17: mod_base = OTHER; note = 2'-O-methyl uridine phosphorothioate
  modified_base 18: mod_base = OTHER; note = 2'-O-methyl cytosine phosphorothioate
  modified_base 19: mod_base = OTHER; note = 2'-O-methyl cytosine phosphorothioate
  modified_base 20: mod_base = OTHER; note = 2'-fluoro adenosine phosphorothioate
  modified_base 21: mod_base = OTHER; note = 2'-O-methyl uridine
tgccatctgggacacatccat

SEQ ID NO: 911 - RNA, 21 nt, synthetic construct
  source 1..21: mol_type = other RNA
  modified_base 1: mod_base = OTHER; note = 5' phosphate 2'-O-methyl uridine phosphorothioate
  modified_base 2: mod_base = OTHER; note = 2'-fluoro uridine phosphorothioate
  modified_base 3: mod_base = OTHER; note = 2'-O-methyl guanosine
  modified_base 4: mod_base = OTHER; note = 2'-fluoro cytosine
  modified_base 5: mod_base = OTHER; note = 2'-fluoro cytosine
  modified_base 6: mod_base = OTHER; note = 2'-fluoro adenosine
  modified_base 7: mod_base = OTHER; note = 2'-O-methyl uridine
  modified_base 8: mod_base = OTHER; note = 2'-fluoro cytosine
  modified_base 9: mod_base = OTHER; note = 2'-O-methyl uridine
  modified_base 10: mod_base = OTHER; note = 2'-fluoro guanosine
  modified_base 11: mod_base = OTHER; note = 2'-O-methyl guanosine
  modified_base 12: mod_base = OTHER; note = 2'-fluoro guanosine
  modified_base 13: mod_base = OTHER; note = 2'-O-methyl adenosine
  modified_base 14: mod_base = OTHER; note = 2'-fluoro cytosine phosphorothioate
  modified_base 15: mod_base = OTHER; note = 2'-O-methyl adenosine phosphorothioate
  modified_base 16: mod_base = OTHER; note = 2'-fluoro cytosine phosphorothioate
  modified_base 17: mod_base = OTHER; note = 2'-O-methyl adenosine phosphorothioate
  modified_base 18: mod_base = OTHER; note = 2'-O-methyl uridine phosphorothioate
  modified_base 19: mod_base = OTHER; note = 2'-O-methyl cytosine phosphorothioate
  modified_base 20: mod_base = OTHER; note = 2'-fluoro cytosine phosphorothioate
  modified_base 21: mod_base = OTHER; note = 2'-O-methyl uridine
ttgccatctgggacacatcct

SEQ ID NO: 912 - RNA, 21 nt, synthetic construct
  source 1..21: mol_type = other RNA
  modified_base 1: mod_base = OTHER; note = 5' phosphate 2'-O-methyl uridine phosphorothioate
  modified_base 2: mod_base = OTHER; note = 2'-fluoro adenosine phosphorothioate
  modified_base 3: mod_base = OTHER; note = 2'-O-methyl uridine
  modified_base 4: mod_base = OTHER; note = 2'-fluoro guanosine
  modified_base 5: mod_base = OTHER; note = 2'-fluoro cytosine
  modified_base 6: mod_base = OTHER; note = 2'-fluoro cytosine
  modified_base 7: mod_base = OTHER; note = 2'-O-methyl adenosine
  modified_base 8: mod_base = OTHER; note = 2'-fluoro uridine
  modified_base 9: mod_base = OTHER; note = 2'-O-methyl cytosine
  modified_base 10: mod_base = OTHER; note = 2'-fluoro uridine
  modified_base 11: mod_base = OTHER; note = 2'-O-methyl guanosine
  modified_base 12: mod_base = OTHER; note = 2'-fluoro guanosine
  modified_base 13: mod_base = OTHER; note = 2'-O-methyl guanosine
  modified_base 14: mod_base = OTHER; note = 2'-fluoro adenosine phosphorothioate
  modified_base 15: mod_base = OTHER; note = 2'-O-methyl cytosine phosphorothioate
  modified_base 16: mod_base = OTHER; note = 2'-fluoro adenosine phosphorothioate
  modified_base 17: mod_base = OTHER; note = 2'-O-methyl cytosine phosphorothioate
  modified_base 18: mod_base = OTHER; note = 2'-O-methyl adenosine phosphorothioate
  modified_base 19: mod_base = OTHER; note = 2'-O-methyl uridine phosphorothioate
  modified_base 20: mod_base = OTHER; note = 2'-fluoro cytosine phosphorothioate
  modified_base 21: mod_base = OTHER; note = 2'-O-methyl uridine
tatgccatctgggacacatct

SEQ ID NO: 913 - RNA, 21 nt, synthetic construct
  source 1..21: mol_type = other RNA
  modified_base 1: mod_base = OTHER; note = 5' phosphate 2'-O-methyl uridine phosphorothioate
  modified_base 2: mod_base = OTHER; note = 2'-fluoro adenosine phosphorothioate
  modified_base 3: mod_base = OTHER; note = 2'-O-methyl adenosine
  modified_base 4: mod_base = OTHER; note = 2'-fluoro uridine
  modified_base 5: mod_base = OTHER; note = 2'-fluoro guanosine
  modified_base 6: mod_base = OTHER; note = 2'-fluoro cytosine
  modified_base 7: mod_base = OTHER; note = 2'-O-methyl cytosine
  modified_base 8: mod_base = OTHER; note = 2'-fluoro adenosine
  modified_base 9: mod_base = OTHER; note = 2'-O-methyl uridine
  modified_base 10: mod_base = OTHER; note = 2'-fluoro cytosine
  modified_base 11: mod_base = OTHER; note = 2'-O-methyl uridine
  modified_base 12: mod_base = OTHER; note = 2'-fluoro guanosine
  modified_base 13: mod_base = OTHER; note = 2'-O-methyl guanosine
  modified_base 14: mod_base = OTHER; note = 2'-fluoro guanosine phosphorothioate
  modified_base 15: mod_base = OTHER; note = 2'-O-methyl adenosine phosphorothioate
  modified_base 16: mod_base = OTHER; note = 2'-fluoro cytosine phosphorothioate
  modified_base 17: mod_base = OTHER; note = 2'-O-methyl adenosine phosphorothioate
  modified_base 18: mod_base = OTHER; note = 2'-O-methyl cytosine phosphorothioate
  modified_base 19: mod_base = OTHER; note = 2'-O-methyl adenosine phosphorothioate
  modified_base 20: mod_base = OTHER; note = 2'-fluoro uridine phosphorothioate
  modified_base 21: mod_base = OTHER; note = 2'-O-methyl uridine
taatgccatctgggacacatt

SEQ ID NO: 914 - RNA, 21 nt, synthetic construct
  source 1..21: mol_type = other RNA
  modified_base 1: mod_base = OTHER; note = 5' phosphate 2'-O-methyl uridine phosphorothioate
  modified_base 2: mod_base = OTHER; note = 2'-fluoro cytosine phosphorothioate
  modified_base 3: mod_base = OTHER; note = 2'-O-methyl adenosine
  modified_base 4: mod_base = OTHER; note = 2'-fluoro adenosine
  modified_base 5: mod_base = OTHER; note = 2'-fluoro adenosine
  modified_base 6: mod_base = OTHER; note = 2'-fluoro uridine
  modified_base 7: mod_base = OTHER; note = 2'-O-methyl guanosine
  modified_base 8: mod_base = OTHER; note = 2'-fluoro cytosine
  modified_base 9: mod_base = OTHER; note = 2'-O-methyl cytosine
  modified_base 10: mod_base = OTHER; note = 2'-fluoro adenosine
  modified_base 11: mod_base = OTHER; note = 2'-O-methyl uridine
  modified_base 12: mod_base = OTHER; note = 2'-fluoro cytosine
  modified_base 13: mod_base = OTHER; note = 2'-O-methyl uridine
  modified_base 14: mod_base = OTHER; note = 2'-fluoro guanosine phosphorothioate
  modified_base 15: mod_base = OTHER; note = 2'-O-methyl guanosine phosphorothioate
  modified_base 16: mod_base = OTHER; note = 2'-fluoro guanosine phosphorothioate
  modified_base 17: mod_base = OTHER; note = 2'-O-methyl adenosine phosphorothioate
  modified_base 18: mod_base = OTHER; note = 2'-O-methyl cytosine phosphorothioate
  modified_base 19: mod_base = OTHER; note = 2'-O-methyl adenosine phosphorothioate
  modified_base 20: mod_base = OTHER; note = 2'-fluoro cytosine phosphorothioate
  modified_base 21: mod_base = OTHER; note = 2'-O-methyl uridine
tcaaatgccatctgggacact

SEQ ID NO: 915 - RNA, 21 nt, synthetic construct
  source 1..21: mol_type = other RNA
  modified_base 1: mod_base = OTHER; note = 5' phosphate 2'-O-methyl uridine phosphorothioate
  modified_base 2: mod_base = OTHER; note = 2'-fluoro adenosine phosphorothioate
  modified_base 3: mod_base = OTHER; note = 2'-O-methyl cytosine
  modified_base 4: mod_base = OTHER; note = 2'-fluoro cytosine
  modified_base 5: mod_base = OTHER; note = 2'-fluoro adenosine
  modified_base 6: mod_base = OTHER; note = 2'-fluoro adenosine
  modified_base 7: mod_base = OTHER; note = 2'-O-methyl adenosine
  modified_base 8: mod_base = OTHER; note = 2'-fluoro uridine
  modified_base 9: mod_base = OTHER; note = 2'-O-methyl guanosine
  modified_base 10: mod_base = OTHER; note = 2'-fluoro cytosine
  modified_base 11: mod_base = OTHER; note = 2'-O-methyl cytosine
  modified_base 12: mod_base = OTHER; note = 2'-fluoro adenosine
  modified_base 13: mod_base = OTHER; note = 2'-O-methyl uridine
  modified_base 14: mod_base = OTHER; note = 2'-fluoro cytosine phosphorothioate
  modified_base 15: mod_base = OTHER; note = 2'-O-methyl uridine phosphorothioate
  modified_base 16: mod_base = OTHER; note = 2'-fluoro guanosine phosphorothioate
  modified_base 17: mod_base = OTHER; note = 2'-O-methyl guanosine phosphorothioate
  modified_base 18: mod_base = OTHER; note = 2'-O-methyl guanosine phosphorothioate
  modified_base 19: mod_base = OTHER; note = 2'-O-methyl adenosine phosphorothioate
  modified_base 20: mod_base = OTHER; note = 2'-fluoro cytosine phosphorothioate
  modified_base 21: mod_base = OTHER; note = 2'-O-methyl uridine
taccaaatgccatctgggact

SEQ ID NO: 916 - RNA, 21 nt, synthetic construct
  source 1..21: mol_type = other RNA
  modified_base 1: mod_base = OTHER; note = 5' phosphate 2'-O-methyl uridine phosphorothioate
  modified_base 2: mod_base = OTHER; note = 2'-fluoro uridine phosphorothioate
  modified_base 3: mod_base = OTHER; note = 2'-O-methyl adenosine
  modified_base 4: mod_base = OTHER; note = 2'-fluoro cytosine
  modified_base 5: mod_base = OTHER; note = 2'-fluoro cytosine
  modified_base 6: mod_base = OTHER; note = 2'-fluoro adenosine
  modified_base 7: mod_base = OTHER; note = 2'-O-methyl adenosine
  modified_base 8: mod_base = OTHER; note = 2'-fluoro adenosine
  modified_base 9: mod_base = OTHER; note = 2'-O-methyl uridine
  modified_base 10: mod_base = OTHER; note = 2'-fluoro guanosine
  modified_base 11: mod_base = OTHER; note = 2'-O-methyl cytosine
  modified_base 12: mod_base = OTHER; note = 2'-fluoro cytosine
  modified_base 13: mod_base = OTHER; note = 2'-O-methyl adenosine
  modified_base 14: mod_base = OTHER; note = 2'-fluoro uridine phosphorothioate
  modified_base 15: mod_base = OTHER; note = 2'-O-methyl cytosine phosphorothioate
  modified_base 16: mod_base = OTHER; note = 2'-fluoro uridine phosphorothioate
  modified_base 17: mod_base = OTHER; note = 2'-O-methyl guanosine phosphorothioate
  modified_base 18: mod_base = OTHER; note = 2'-O-methyl guanosine phosphorothioate
  modified_base 19: mod_base = OTHER; note = 2'-O-methyl guanosine phosphorothioate
  modified_base 20: mod_base = OTHER; note = 2'-fluoro adenosine phosphorothioate
  modified_base 21: mod_base = OTHER; note = 2'-O-methyl uridine
ttaccaaatgccatctgggat

SEQ ID NO: 917 - RNA, 21 nt, synthetic construct
  source 1..21: mol_type = other RNA
  modified_base 1: mod_base = OTHER; note = 5' phosphate 2'-O-methyl uridine phosphorothioate
  modified_base 2: mod_base = OTHER; note = 2'-fluoro uridine phosphorothioate
  modified_base 3: mod_base = OTHER; note = 2'-O-methyl uridine
  modified_base 4: mod_base = OTHER; note = 2'-fluoro adenosine
  modified_base 5: mod_base = OTHER; note = 2'-fluoro cytosine
  modified_base 6: mod_base = OTHER; note = 2'-fluoro cytosine
  modified_base 7: mod_base = OTHER; note = 2'-O-methyl adenosine
  modified_base 8: mod_base = OTHER; note = 2'-fluoro adenosine
  modified_base 9: mod_base = OTHER; note = 2'-O-methyl adenosine
  modified_base 10: mod_base = OTHER; note = 2'-fluoro uridine
  modified_base 11: mod_base = OTHER; note = 2'-O-methyl guanosine
  modified_base 12: mod_base = OTHER; note = 2'-fluoro cytosine
  modified_base 13: mod_base = OTHER; note = 2'-O-methyl cytosine
  modified_base 14: mod_base = OTHER; note = 2'-fluoro adenosine phosphorothioate
  modified_base 15: mod_base = OTHER; note = 2'-O-methyl uridine phosphorothioate
  modified_base 16: mod_base = OTHER; note = 2'-fluoro cytosine phosphorothioate
  modified_base 17: mod_base = OTHER; note = 2'-O-methyl uridine phosphorothioate
  modified_base 18: mod_base = OTHER; note = 2'-O-methyl guanosine phosphorothioate
  modified_base 19: mod_base = OTHER; note = 2'-O-methyl guanosine phosphorothioate
  modified_base 20: mod_base = OTHER; note = 2'-fluoro guanosine phosphorothioate
  modified_base 21: mod_base = OTHER; note = 2'-O-methyl uridine
tttaccaaatgccatctgggt

SEQ ID NO: 918 - RNA, 21 nt, synthetic construct
  source 1..21: mol_type = other RNA
  modified_base 1: mod_base = OTHER; note = 5' phosphate 2'-O-methyl uridine phosphorothioate
  modified_base 2: mod_base = OTHER; note = 2'-fluoro cytosine phosphorothioate
  modified_base 3: mod_base = OTHER; note = 2'-O-methyl uridine
  modified_base 4: mod_base = OTHER; note = 2'-fluoro uridine
  modified_base 5: mod_base = OTHER; note = 2'-fluoro adenosine
  modified_base 6: mod_base = OTHER; note = 2'-fluoro cytosine
  modified_base 7: mod_base = OTHER; note = 2'-O-methyl cytosine
  modified_base 8: mod_base = OTHER; note = 2'-fluoro adenosine
  modified_base 9: mod_base = OTHER; note = 2'-O-methyl adenosine
  modified_base 10: mod_base = OTHER; note = 2'-fluoro adenosine
  modified_base 11: mod_base = OTHER; note = 2'-O-methyl uridine
  modified_base 12: mod_base = OTHER; note = 2'-fluoro guanosine
  modified_base 13: mod_base = OTHER; note = 2'-O-methyl cytosine
  modified_base 14: mod_base = OTHER; note = 2'-fluoro cytosine phosphorothioate
  modified_base 15: mod_base = OTHER; note = 2'-O-methyl adenosine phosphorothioate
  modified_base 16: mod_base = OTHER; note = 2'-fluoro uridine phosphorothioate
  modified_base 17: mod_base = OTHER; note = 2'-O-methyl cytosine phosphorothioate
  modified_base 18: mod_base = OTHER; note = 2'-O-methyl uridine phosphorothioate
  modified_base 19: mod_base = OTHER; note = 2'-O-methyl guanosine phosphorothioate
  modified_base 20: mod_base = OTHER; note = 2'-fluoro guanosine phosphorothioate
  modified_base 21: mod_base = OTHER; note = 2'-O-methyl uridine
tcttaccaaatgccatctggt

SEQ ID NO: 919 - RNA, 21 nt, synthetic construct
  source 1..21: mol_type = other RNA
  modified_base 1: mod_base = OTHER; note = 5' phosphate 2'-O-methyl uridine phosphorothioate
  modified_base 2: mod_base = OTHER; note = 2'-fluoro uridine phosphorothioate
  modified_base 3: mod_base = OTHER; note = 2'-O-methyl cytosine
  modified_base 4: mod_base = OTHER; note = 2'-fluoro uridine
  modified_base 5: mod_base = OTHER; note = 2'-fluoro uridine
  modified_base 6: mod_base = OTHER; note = 2'-fluoro adenosine
  modified_base 7: mod_base = OTHER; note = 2'-O-methyl cytosine
  modified_base 8: mod_base = OTHER; note = 2'-fluoro cytosine
  modified_base 9: mod_base = OTHER; note = 2'-O-methyl adenosine
  modified_base 10: mod_base = OTHER; note = 2'-fluoro adenosine
  modified_base 11: mod_base = OTHER; note = 2'-O-methyl adenosine
  modified_base 12: mod_base = OTHER; note = 2'-fluoro uridine
  modified_base 13: mod_base = OTHER; note = 2'-O-methyl guanosine
  modified_base 14: mod_base = OTHER; note = 2'-fluoro cytosine phosphorothioate
  modified_base 15: mod_base = OTHER; note = 2'-O-methyl cytosine phosphorothioate
  modified_base 16: mod_base = OTHER; note = 2'-fluoro adenosine phosphorothioate
  modified_base 17: mod_base = OTHER; note = 2'-O-methyl uridine phosphorothioate
  modified_base 18: mod_base = OTHER; note = 2'-O-methyl cytosine phosphorothioate
  modified_base 19: mod_base = OTHER; note = 2'-O-methyl uridine phosphorothioate
  modified_base 20: mod_base = OTHER; note = 2'-fluoro guanosine phosphorothioate
  modified_base 21: mod_base = OTHER; note = 2'-O-methyl uridine
ttcttaccaaatgccatctgt

SEQ ID NO: 920 - RNA, 21 nt, synthetic construct
  source 1..21: mol_type = other RNA
  modified_base 1: mod_base = OTHER; note = 5' phosphate 2'-O-methyl uridine phosphorothioate
  modified_base 2: mod_base = OTHER; note = 2'-fluoro uridine phosphorothioate
  modified_base 3: mod_base = OTHER; note = 2'-O-methyl uridine
  modified_base 4: mod_base = OTHER; note = 2'-fluoro cytosine
  modified_base 5: mod_base = OTHER; note = 2'-fluoro uridine
  modified_base 6: mod_base = OTHER; note = 2'-fluoro uridine
  modified_base 7: mod_base = OTHER; note = 2'-O-methyl adenosine
  modified_base 8: mod_base = OTHER; note = 2'-fluoro cytosine
  modified_base 9: mod_base = OTHER; note = 2'-O-methyl cytosine
  modified_base 10: mod_base = OTHER; note = 2'-fluoro adenosine
  modified_base 11: mod_base = OTHER; note = 2'-O-methyl adenosine
  modified_base 12: mod_base = OTHER; note = 2'-fluoro adenosine
  modified_base 13: mod_base = OTHER; note = 2'-O-methyl uridine
  modified_base 14: mod_base = OTHER; note = 2'-fluoro guanosine phosphorothioate
  modified_base 15: mod_base = OTHER; note = 2'-O-methyl cytosine phosphorothioate
  modified_base 16: mod_base = OTHER; note = 2'-fluoro cytosine phosphorothioate
  modified_base 17: mod_base = OTHER; note = 2'-O-methyl adenosine phosphorothioate
  modified_base 18: mod_base = OTHER; note = 2'-O-methyl uridine phosphorothioate
  modified_base 19: mod_base = OTHER; note = 2'-O-methyl cytosine phosphorothioate
  modified_base 20: mod_base = OTHER; note = 2'-fluoro uridine phosphorothioate
  modified_base 21: mod_base = OTHER; note = 2'-O-methyl uridine
tttcttaccaaatgccatctt

SEQ ID NO: 921 - RNA, 21 nt, synthetic construct
  source 1..21: mol_type = other RNA
  modified_base 1: mod_base = OTHER; note = 5' phosphate 2'-O-methyl uridine phosphorothioate
  modified_base 2: mod_base = OTHER; note = 2'-fluoro adenosine phosphorothioate
  modified_base 3: mod_base = OTHER; note = 2'-O-methyl uridine
  modified_base 4: mod_base = OTHER; note = 2'-fluoro uridine
  modified_base 5: mod_base = OTHER; note = 2'-fluoro cytosine
  modified_base 6: mod_base = OTHER; note = 2'-fluoro uridine
  modified_base 7: mod_base = OTHER; note = 2'-O-methyl uridine
  modified_base 8: mod_base = OTHER; note = 2'-fluoro adenosine
  modified_base 9: mod_base = OTHER; note = 2'-O-methyl cytosine
  modified_base 10: mod_base = OTHER; note = 2'-fluoro cytosine
  modified_base 11: mod_base = OTHER; note = 2'-O-methyl adenosine
  modified_base 12: mod_base = OTHER; note = 2'-fluoro adenosine
  modified_base 13: mod_base = OTHER; note = 2'-O-methyl adenosine
  modified_base 14: mod_base = OTHER; note = 2'-fluoro uridine phosphorothioate
  modified_base 15: mod_base = OTHER; note = 2'-O-methyl guanosine phosphorothioate
  modified_base 16: mod_base = OTHER; note = 2'-fluoro cytosine phosphorothioate
  modified_base 17: mod_base = OTHER; note = 2'-O-methyl cytosine phosphorothioate
  modified_base 18: mod_base = OTHER; note = 2'-O-methyl adenosine phosphorothioate
  modified_base 19: mod_base = OTHER; note = 2'-O-methyl uridine phosphorothioate
  modified_base 20: mod_base = OTHER; note = 2'-fluoro cytosine phosphorothioate
  modified_base 21: mod_base = OTHER; note = 2'-O-methyl uridine
tattcttaccaaatgccatct

SEQ ID NO: 922 - RNA, 21 nt, synthetic construct
  source 1..21: mol_type = other RNA
  modified_base 1: mod_base = OTHER; note = 5' phosphate 2'-O-methyl uridine phosphorothioate
  modified_base 2: mod_base = OTHER; note = 2'-fluoro uridine phosphorothioate
  modified_base 3: mod_base = OTHER; note = 2'-O-methyl adenosine
  modified_base 4: mod_base = OTHER; note = 2'-fluoro uridine
  modified_base 5: mod_base = OTHER; note = 2'-fluoro uridine
  modified_base 6: mod_base = OTHER; note = 2'-fluoro cytosine
  modified_base 7: mod_base = OTHER; note = 2'-O-methyl uridine
  modified_base 8: mod_base = OTHER; note = 2'-fluoro uridine
  modified_base 9: mod_base = OTHER; note = 2'-O-methyl adenosine
  modified_base 10: mod_base = OTHER; note = 2'-fluoro cytosine
  modified_base 11: mod_base = OTHER; note = 2'-O-methyl cytosine
  modified_base 12: mod_base = OTHER; note = 2'-fluoro adenosine
  modified_base 13: mod_base = OTHER; note = 2'-O-methyl adenosine
  modified_base 14: mod_base = OTHER; note = 2'-fluoro adenosine phosphorothioate
  modified_base 15: mod_base = OTHER; note = 2'-O-methyl uridine phosphorothioate
  modified_base 16: mod_base = OTHER; note = 2'-fluoro guanosine phosphorothioate
  modified_base 17: mod_base = OTHER; note = 2'-O-methyl cytosine phosphorothioate
  modified_base 18: mod_base = OTHER; note = 2'-O-methyl cytosine phosphorothioate
  modified_base 19: mod_base = OTHER; note = 2'-O-methyl adenosine phosphorothioate
  modified_base 20: mod_base = OTHER; note = 2'-fluoro uridine phosphorothioate
  modified_base 21: mod_base = OTHER; note = 2'-O-methyl uridine
ttattcttaccaaatgccatt

SEQ ID NO: 923 - RNA, 21 nt, synthetic construct
  source 1..21: mol_type = other RNA
  modified_base 1: mod_base = OTHER; note = 5' phosphate 2'-O-methyl uridine phosphorothioate
  modified_base 2: mod_base = OTHER; note = 2'-fluoro adenosine phosphorothioate
  modified_base 3: mod_base = OTHER; note = 2'-O-methyl uridine
  modified_base 4: mod_base = OTHER; note = 2'-fluoro adenosine
  modified_base 5: mod_base = OTHER; note = 2'-fluoro uridine
  modified_base 6: mod_base = OTHER; note = 2'-fluoro uridine
  modified_base 7: mod_base = OTHER; note = 2'-O-methyl cytosine
  modified_base 8: mod_base = OTHER; note = 2'-fluoro uridine
  modified_base 9: mod_base = OTHER; note = 2'-O-methyl uridine
  modified_base 10: mod_base = OTHER; note = 2'-fluoro adenosine
  modified_base 11: mod_base = OTHER; note = 2'-O-methyl cytosine
  modified_base 12: mod_base = OTHER; note = 2'-fluoro cytosine
  modified_base 13: mod_base = OTHER; note = 2'-O-methyl adenosine
  modified_base 14: mod_base = OTHER; note = 2'-fluoro adenosine phosphorothioate
  modified_base 15: mod_base = OTHER; note = 2'-O-methyl adenosine phosphorothioate
  modified_base 16: mod_base = OTHER; note = 2'-fluoro uridine phosphorothioate
  modified_base 17: mod_base = OTHER; note = 2'-O-methyl guanosine phosphorothioate
  modified_base 18: mod_base = OTHER; note = 2'-O-methyl cytosine phosphorothioate
  modified_base 19: mod_base = OTHER; note = 2'-O-methyl cytosine phosphorothioate
  modified_base 20: mod_base = OTHER; note = 2'-fluoro adenosine phosphorothioate
  modified_base 21: mod_base = OTHER; note = 2'-O-methyl uridine
tatattcttaccaaatgccat

SEQ ID NO: 924 - RNA, 21 nt, synthetic construct
  source 1..21: mol_type = other RNA
  modified_base 1: mod_base = OTHER; note = 5' phosphate 2'-O-methyl uridine phosphorothioate
  modified_base 2: mod_base = OTHER; note = 2'-fluoro guanosine phosphorothioate
  modified_base 3: mod_base = OTHER; note = 2'-O-methyl adenosine
  modified_base 4: mod_base = OTHER; note = 2'-fluoro uridine
  modified_base 5: mod_base = OTHER; note = 2'-fluoro adenosine
  modified_base 6: mod_base = OTHER; note = 2'-fluoro uridine
  modified_base 7: mod_base = OTHER; note = 2'-O-methyl uridine
  modified_base 8: mod_base = OTHER; note = 2'-fluoro cytosine
  modified_base 9: mod_base = OTHER; note = 2'-O-methyl uridine
  modified_base 10: mod_base = OTHER; note = 2'-fluoro uridine
  modified_base 11: mod_base = OTHER; note = 2'-O-methyl adenosine
  modified_base 12: mod_base = OTHER; note = 2'-fluoro cytosine
  modified_base 13: mod_base = OTHER; note = 2'-O-methyl cytosine
  modified_base 14: mod_base = OTHER; note = 2'-fluoro adenosine phosphorothioate
  modified_base 15: mod_base = OTHER; note = 2'-O-methyl adenosine phosphorothioate
  modified_base 16: mod_base = OTHER; note = 2'-fluoro adenosine phosphorothioate
  modified_base 17: mod_base = OTHER; note = 2'-O-methyl uridine phosphorothioate
  modified_base 18: mod_base = OTHER; note = 2'-O-methyl guanosine phosphorothioate
  modified_base 19: mod_base = OTHER; note = 2'-O-methyl cytosine phosphorothioate
  modified_base 20: mod_base = OTHER; note = 2'-fluoro cytosine phosphorothioate
  modified_base 21: mod_base = OTHER; note = 2'-O-methyl uridine
tgatattcttaccaaatgcct

SEQ ID NO: 925 - RNA, 21 nt, synthetic construct
  source 1..21: mol_type = other RNA
  modified_base 1: mod_base = OTHER; note = 5' phosphate 2'-O-methyl uridine phosphorothioate
  modified_base 2: mod_base = OTHER; note = 2'-fluoro adenosine phosphorothioate
  modified_base 3: mod_base = OTHER; note = 2'-O-methyl guanosine
  modified_base 4: mod_base = OTHER; note = 2'-fluoro adenosine
  modified_base 5: mod_base = OTHER; note = 2'-fluoro uridine
  modified_base 6: mod_base = OTHER; note = 2'-fluoro adenosine
  modified_base 7: mod_base = OTHER; note = 2'-O-methyl uridine
  modified_base 8: mod_base = OTHER; note = 2'-fluoro uridine
  modified_base 9: mod_base = OTHER; note = 2'-O-methyl cytosine
  modified_base 10: mod_base = OTHER; note = 2'-fluoro uridine
  modified_base 11: mod_base = OTHER; note = 2'-O-methyl uridine
  modified_base 12: mod_base = OTHER; note = 2'-fluoro adenosine
  modified_base 13: mod_base = OTHER; note = 2'-O-methyl cytosine
  modified_base 14: mod_base = OTHER; note = 2'-fluoro cytosine phosphorothioate
  modified_base 15: mod_base = OTHER; note = 2'-O-methyl adenosine phosphorothioate
  modified_base 16: mod_base = OTHER; note = 2'-fluoro adenosine phosphorothioate
  modified_base 17: mod_base = OTHER; note = 2'-O-methyl adenosine phosphorothioate
  modified_base 18: mod_base = OTHER; note = 2'-O-methyl uridine phosphorothioate
  modified_base 19: mod_base = OTHER; note = 2'-O-methyl guanosine phosphorothioate
  modified_base 20: mod_base = OTHER; note = 2'-fluoro cytosine phosphorothioate
  modified_base 21: mod_base = OTHER; note = 2'-O-methyl uridine
tagatattcttaccaaatgct

SEQ ID NO: 926 - RNA, 16 nt, synthetic construct
  source 1..16: mol_type = other RNA
  modified_base 1: mod_base = OTHER; note = 2'-O-methyl adenosine phosphorothioate
  modified_base 2: mod_base = OTHER; note = 2'-O-methyl guanosine phosphorothioate
  modified_base 3: mod_base = OTHER; note = 2'-O-methyl uridine
  modified_base 4: mod_base = OTHER; note = 2'-fluoro uridine
  modified_base 5: mod_base = OTHER; note = 2'-O-methyl uridine
  modified_base 6: mod_base = OTHER; note = 2'-fluoro guanosine
  modified_base 7: mod_base = OTHER; note = 2'-O-methyl guanosine
  modified_base 8: mod_base = OTHER; note = 2'-fluoro guanosine
  modified_base 9: mod_base = OTHER; note = 2'-O-methyl cytosine
  modified_base 10: mod_base = OTHER; note = 2'-fluoro cytosine
  modified_base 11: mod_base = OTHER; note = 2'-O-methyl cytosine
  modified_base 12: mod_base = OTHER; note = 2'-O-methyl guanosine
  modified_base 13: mod_base = OTHER; note = 2'-O-methyl cytosine
  modified_base 14: mod_base = OTHER; note = 2'-fluoro uridine phosphorothioate
  modified_base 15: mod_base = OTHER; note = 2'-O-methyl guanosine phosphorothioate
  modified_base 16: mod_base = OTHER; note = 2'-O-methyl adenosine triethylene glycol
agtttgggcccgctga

SEQ ID NO: 927 - RNA, 16 nt, synthetic construct
  source 1..16: mol_type = other RNA
  modified_base 1: mod_base = OTHER; note = 2'-O-methyl uridine phosphorothioate
  modified_base 2: mod_base = OTHER; note = 2'-O-methyl uridine phosphorothioate
  modified_base 3: mod_base = OTHER; note = 2'-O-methyl uridine
  modified_base 4: mod_base = OTHER; note = 2'-fluoro guanosine
  modified_base 5: mod_base = OTHER; note = 2'-O-methyl guanosine
  modified_base 6: mod_base = OTHER; note = 2'-fluoro guanosine
  modified_base 7: mod_base = OTHER; note = 2'-O-methyl cytosine
  modified_base 8: mod_base = OTHER; note = 2'-fluoro cytosine
  modified_base 9: mod_base = OTHER; note = 2'-O-methyl cytosine
  modified_base 10: mod_base = OTHER; note = 2'-fluoro guanosine
  modified_base 11: mod_base = OTHER; note = 2'-O-methyl cytosine
  modified_base 12: mod_base = OTHER; note = 2'-O-methyl uridine
  modified_base 13: mod_base = OTHER; note = 2'-O-methyl guanosine
  modified_base 14: mod_base = OTHER; note = 2'-fluoro cytosine phosphorothioate
  modified_base 15: mod_base = OTHER; note = 2'-O-methyl adenosine phosphorothioate
  modified_base 16: mod_base = OTHER; note = 2'-O-methyl adenosine triethylene glycol
tttgggcccgctgcaa

SEQ ID NO: 928 - RNA, 16 nt, synthetic construct
  source 1..16: mol_type = other RNA
  modified_base 1: mod_base = OTHER; note = 2'-O-methyl guanosine phosphorothioate
  modified_base 2: mod_base = OTHER; note = 2'-O-methyl guanosine phosphorothioate
  modified_base 3: mod_base = OTHER; note = 2'-O-methyl cytosine
  modified_base 4: mod_base = OTHER; note = 2'-fluoro cytosine
  modified_base 5: mod_base = OTHER; note = 2'-O-methyl cytosine
  modified_base 6: mod_base = OTHER; note = 2'-fluoro guanosine
  modified_base 7: mod_base = OTHER; note = 2'-O-methyl cytosine
  modified_base 8: mod_base = OTHER; note = 2'-fluoro uridine
  modified_base 9: mod_base = OTHER; note = 2'-O-methyl guanosine
  modified_base 10: mod_base = OTHER; note = 2'-fluoro cytosine
  modified_base 11: mod_base = OTHER; note = 2'-O-methyl adenosine
  modified_base 12: mod_base = OTHER; note = 2'-O-methyl guanosine
  modified_base 13: mod_base = OTHER; note = 2'-O-methyl cytosine
  modified_base 14: mod_base = OTHER; note = 2'-fluoro uridine phosphorothioate
  modified_base 15: mod_base = OTHER; note = 2'-O-methyl cytosine phosphorothioate
  modified_base 16: mod_base = OTHER; note = 2'-O-methyl adenosine triethylene glycol
ggcccgctgcagctca

SEQ ID NO: 929 - RNA, 16 nt, synthetic construct
  source 1..16: mol_type = other RNA
  modified_base 1: mod_base = OTHER; note = 2'-O-methyl cytosine phosphorothioate
  modified_base 2: mod_base = OTHER; note = 2'-O-methyl uridine phosphorothioate
  modified_base 3: mod_base = OTHER; note = 2'-O-methyl guanosine
  modified_base 4: mod_base = OTHER; note = 2'-fluoro cytosine
  modified_base 5: mod_base = OTHER; note = 2'-O-methyl adenosine
  modified_base 6: mod_base = OTHER; note = 2'-fluoro guanosine
  modified_base 7: mod_base = OTHER; note = 2'-O-methyl cytosine
  modified_base 8: mod_base = OTHER; note = 2'-fluoro uridine
  modified_base 9: mod_base = OTHER; note = 2'-O-methyl cytosine
  modified_base 10: mod_base = OTHER; note = 2'-fluoro cytosine
  modified_base 11: mod_base = OTHER; note = 2'-O-methyl cytosine
  modified_base 12: mod_base = OTHER; note = 2'-O-methyl uridine
  modified_base 13: mod_base = OTHER; note = 2'-O-methyl guanosine
  modified_base 14: mod_base = OTHER; note = 2'-fluoro uridine phosphorothioate
  modified_base 15: mod_base = OTHER; note = 2'-O-methyl cytosine phosphorothioate
  modified_base 16: mod_base = OTHER; note = 2'-O-methyl adenosine triethylene glycol
ctgcagctccctgtca

SEQ ID NO: 930 - RNA, 16 nt, synthetic construct
  source 1..16: mol_type = other RNA
  modified_base 1: mod_base = OTHER; note = 2'-O-methyl cytosine phosphorothioate
  modified_base 2: mod_base = OTHER; note = 2'-O-methyl uridine phosphorothioate
  modified_base 3: mod_base = OTHER; note = 2'-O-methyl guanosine
  modified_base 4: mod_base = OTHER; note = 2'-fluoro uridine
  modified_base 5: mod_base = OTHER; note = 2'-O-methyl cytosine
  modified_base 6: mod_base = OTHER; note = 2'-fluoro cytosine
  modified_base 7: mod_base = OTHER; note = 2'-O-methyl cytosine
  modified_base 8: mod_base = OTHER; note = 2'-fluoro guanosine
  modified_base 9: mod_base = OTHER; note = 2'-O-methyl guanosine
  modified_base 10: mod_base = OTHER; note = 2'-fluoro cytosine
  modified_base 11: mod_base = OTHER; note = 2'-O-methyl guanosine
  modified_base 12: mod_base = OTHER; note = 2'-O-methyl guanosine
  modified_base 13: mod_base = OTHER; note = 2'-O-methyl guanosine
  modified_base 14: mod_base = OTHER; note = 2'-fluoro uridine phosphorothioate
  modified_base 15: mod_base = OTHER; note = 2'-O-methyl cytosine phosphorothioate
  modified_base 16: mod_base = OTHER; note = 2'-O-methyl adenosine triethylene glycol
ctgtcccggcgggtca

SEQ ID NO: 931 - RNA, 16 nt, synthetic construct
  source 1..16: mol_type = other RNA
  modified_base 1: mod_base = OTHER; note = 2'-O-methyl uridine phosphorothioate
  modified_base 2: mod_base = OTHER; note = 2'-O-methyl cytosine phosphorothioate
  modified_base 3: mod_base = OTHER; note = 2'-O-methyl cytosine
  modified_base 4: mod_base = OTHER; note = 2'-fluoro cytosine
  modified_base 5: mod_base = OTHER; note = 2'-O-methyl adenosine
  modified_base 6: mod_base = OTHER; note = 2'-fluoro guanosine
  modified_base 7: mod_base = OTHER; note = 2'-O-methyl guanosine
  modified_base 8: mod_base = OTHER; note = 2'-fluoro cytosine
  modified_base 9: mod_base = OTHER; note = 2'-O-methyl uridine
  modified_base 10: mod_base = OTHER; note = 2'-fluoro adenosine
  modified_base 11: mod_base = OTHER; note = 2'-O-methyl cytosine
  modified_base 12: mod_base = OTHER; note = 2'-O-methyl guanosine
  modified_base 13: mod_base = OTHER; note = 2'-O-methyl guanosine
  modified_base 14: mod_base = OTHER; note = 2'-fluoro cytosine phosphorothioate
  modified_base 15: mod_base = OTHER; note = 2'-O-methyl guanosine phosphorothioate
  modified_base 16: mod_base = OTHER; note = 2'-O-methyl adenosine triethylene glycol
tcccaggctacggcga

SEQ ID NO: 932 - RNA, 16 nt, synthetic construct
  source 1..16: mol_type = other RNA
  modified_base 1: mod_base = OTHER; note = 2'-O-methyl cytosine phosphorothioate
  modified_base 2: mod_base = OTHER; note = 2'-O-methyl cytosine phosphorothioate
  modified_base 3: mod_base = OTHER; note = 2'-O-methyl adenosine
  modified_base 4: mod_base = OTHER; note = 2'-fluoro guanosine
  modified_base 5: mod_base = OTHER; note = 2'-O-methyl guanosine
  modified_base 6: mod_base = OTHER; note = 2'-fluoro cytosine
  modified_base 7: mod_base = OTHER; note = 2'-O-methyl uridine
  modified_base 8: mod_base = OTHER; note = 2'-fluoro adenosine
  modified_base 9: mod_base = OTHER; note = 2'-O-methyl cytosine
  modified_base 10: mod_base = OTHER; note = 2'-fluoro guanosine
  modified_base 11: mod_base = OTHER; note = 2'-O-methyl guanosine
  modified_base 12: mod_base = OTHER; note = 2'-O-methyl cytosine
  modified_base 13: mod_base = OTHER; note = 2'-O-methyl guanosine
  modified_base 14: mod_base = OTHER; note = 2'-fluoro guanosine phosphorothioate
  modified_base 15: mod_base = OTHER; note = 2'-O-methyl guanosine phosphorothioate
  modified_base 16: mod_base = OTHER; note = 2'-O-methyl adenosine triethylene glycol
ccaggctacggcggga

SEQ ID NO: 933 - RNA, 16 nt, synthetic construct
  source 1..16: mol_type = other RNA
  modified_base 1: mod_base = OTHER; note = 2'-O-methyl guanosine phosphorothioate
  modified_base 2: mod_base = OTHER; note = 2'-O-methyl guanosine phosphorothioate
  modified_base 3: mod_base = OTHER; note = 2'-O-methyl cytosine
  modified_base 4: mod_base = OTHER; note = 2'-fluoro uridine
  modified_base 5: mod_base = OTHER; note = 2'-O-methyl adenosine
  modified_base 6: mod_base = OTHER; note = 2'-fluoro cytosine
  modified_base 7: mod_base = OTHER; note = 2'-O-methyl guanosine
  modified_base 8: mod_base = OTHER; note = 2'-fluoro guanosine
  modified_base 9: mod_base = OTHER; note = 2'-O-methyl cytosine
  modified_base 10: mod_base = OTHER; note = 2'-fluoro guanosine
  modified_base 11: mod_base = OTHER; note = 2'-O-methyl guanosine
  modified_base 12: mod_base = OTHER; note = 2'-O-methyl guanosine
  modified_base 13: mod_base = OTHER; note = 2'-O-methyl guanosine
  modified_base 14: mod_base = OTHER; note = 2'-fluoro adenosine phosphorothioate
  modified_base 15: mod_base = OTHER; note = 2'-O-methyl uridine phosphorothioate
  modified_base 16: mod_base = OTHER; note = 2'-O-methyl adenosine triethylene glycol
ggctacggcggggata

SEQ ID NO: 934 - RNA, 16 nt, synthetic construct
  source 1..16: mol_type = other RNA
  modified_base 1: mod_base = OTHER; note = 2'-O-methyl guanosine phosphorothioate
  modified_base 2: mod_base = OTHER; note = 2'-O-methyl cytosine phosphorothioate
  modified_base 3: mod_base = OTHER; note = 2'-O-methyl uridine
  modified_base 4: mod_base = OTHER; note = 2'-fluoro adenosine
  modified_base 5: mod_base = OTHER; note = 2'-O-methyl cytosine
  modified_base 6: mod_base = OTHER; note = 2'-fluoro guanosine
  modified_base 7: mod_base = OTHER; note = 2'-O-methyl guanosine
  modified_base 8: mod_base = OTHER; note = 2'-fluoro cytosine
  modified_base 9: mod_base = OTHER; note = 2'-O-methyl guanosine
  modified_base 10: mod_base = OTHER; note = 2'-fluoro guanosine
  modified_base 11: mod_base = OTHER; note = 2'-O-methyl guanosine
  modified_base 12: mod_base = OTHER; note = 2'-O-methyl guanosine
  modified_base 13: mod_base = OTHER; note = 2'-O-methyl adenosine
  modified_base 14: mod_base = OTHER; note = 2'-fluoro uridine phosphorothioate
  modified_base 15: mod_base = OTHER; note = 2'-O-methyl guanosine phosphorothioate
  modified_base 16: mod_base = OTHER; note = 2'-O-methyl adenosine triethylene glycol
gctacggcggggatga

SEQ ID NO: 935 - RNA, 16 nt, synthetic construct
  source 1..16: mol_type = other RNA
  modified_base 1: mod_base = OTHER; note = 2'-O-methyl guanosine phosphorothioate
  modified_base 2: mod_base = OTHER; note = 2'-O-methyl cytosine phosphorothioate
  modified_base 3: mod_base = OTHER; note = 2'-O-methyl guanosine
  modified_base 4: mod_base = OTHER; note = 2'-fluoro guanosine
  modified_base 5: mod_base = OTHER; note = 2'-O-methyl guanosine
  modified_base 6: mod_base = OTHER; note = 2'-fluoro guanosine
  modified_base 7: mod_base = OTHER; note = 2'-O-methyl adenosine
  modified_base 8: mod_base = OTHER; note = 2'-fluoro uridine
  modified_base 9: mod_base = OTHER; note = 2'-O-methyl guanosine
  modified_base 10: mod_base = OTHER; note = 2'-fluoro guanosine
  modified_base 11: mod_base = OTHER; note = 2'-O-methyl cytosine
  modified_base 12: mod_base = OTHER; note = 2'-O-methyl guanosine
  modified_base 13: mod_base = OTHER; note = 2'-O-methyl guanosine
  modified_base 14: mod_base = OTHER; note = 2'-fluoro uridine phosphorothioate
  modified_base 15: mod_base = OTHER; note = 2'-O-methyl adenosine phosphorothioate
  modified_base 16: mod_base = OTHER; note = 2'-O-methyl adenosine triethylene glycol
gcggggatggcggtaa

SEQ ID NO: 936 - RNA, 16 nt, synthetic construct
  source 1..16: mol_type = other RNA
  modified_base 1: mod_base = OTHER; note = 2'-O-methyl cytosine phosphorothioate
  modified_base 2: mod_base = OTHER; note = 2'-O-methyl guanosine phosphorothioate
  modified_base 3: mod_base = OTHER; note = 2'-O-methyl guanosine
  modified_base 4: mod_base = OTHER; note = 2'-fluoro guanosine
  modified_base 5: mod_base = OTHER; note = 2'-O-methyl guanosine
  modified_base 6: mod_base = OTHER; note = 2'-fluoro adenosine
  modified_base 7: mod_base = OTHER; note = 2'-O-methyl uridine
  modified_base 8: mod_base = OTHER; note = 2'-fluoro guanosine
  modified_base 9: mod_base = OTHER; note = 2'-O-methyl guanosine
  modified_base 10: mod_base = OTHER; note = 2'-fluoro cytosine
  modified_base 11: mod_base = OTHER; note = 2'-O-methyl guanosine
  modified_base 12: mod_base = OTHER; note = 2'-O-methyl guanosine
  modified_base 13: mod_base = OTHER; note = 2'-O-methyl uridine
  modified_base 14: mod_base = OTHER; note = 2'-fluoro adenosine phosphorothioate
  modified_base 15: mod_base = OTHER; note = 2'-O-methyl adenosine phosphorothioate
  modified_base 16: mod_base = OTHER; note = 2'-O-methyl adenosine triethylene glycol
cggggatggcggtaaa

SEQ ID NO: 937 - RNA, 16 nt, synthetic construct
  source 1..16: mol_type = other RNA
  modified_base 1: mod_base = OTHER; note = 2'-O-methyl adenosine phosphorothioate
  modified_base 2: mod_base = OTHER; note = 2'-O-methyl uridine phosphorothioate
  modified_base 3: mod_base = OTHER; note = 2'-O-methyl guanosine
  modified_base 4: mod_base = OTHER; note = 2'-fluoro guanosine
  modified_base 5: mod_base = OTHER; note = 2'-O-methyl cytosine
  modified_base 6: mod_base = OTHER; note = 2'-fluoro guanosine
  modified_base 7: mod_base = OTHER; note = 2'-O-methyl guanosine
  modified_base 8: mod_base = OTHER; note = 2'-fluoro uridine
  modified_base 9: mod_base = OTHER; note = 2'-O-methyl adenosine
  modified_base 10: mod_base = OTHER; note = 2'-fluoro adenosine
  modified_base 11: mod_base = OTHER; note = 2'-O-methyl cytosine
  modified_base 12: mod_base = OTHER; note = 2'-O-methyl cytosine
  modified_base 13: mod_base = OTHER; note = 2'-O-methyl cytosine
  modified_base 14: mod_base = OTHER; note = 2'-fluoro uridine phosphorothioate
  modified_base 15: mod_base = OTHER; note = 2'-O-methyl guanosine phosphorothioate
  modified_base 16: mod_base = OTHER; note = 2'-O-methyl adenosine triethylene glycol
atggcggtaaccctga

SEQ ID NO: 938 - RNA, 16 nt, synthetic construct
  source 1..16: mol_type = other RNA
  modified_base 1: mod_base = OTHER; note = 2'-O-methyl guanosine phosphorothioate
  modified_base 2: mod_base = OTHER; note = 2'-O-methyl cytosine phosphorothioate
  modified_base 3: mod_base = OTHER; note = 2'-O-methyl guanosine
  modified_base 4: mod_base = OTHER; note = 2'-fluoro guanosine
  modified_base 5: mod_base = OTHER; note = 2'-O-methyl uridine
  modified_base 6: mod_base = OTHER; note = 2'-fluoro adenosine
  modified_base 7: mod_base = OTHER; note = 2'-O-methyl adenosine
  modified_base 8: mod_base = OTHER; note = 2'-fluoro cytosine
  modified_base 9: mod_base = OTHER; note = 2'-O-methyl cytosine
  modified_base 10: mod_base = OTHER; note = 2'-fluoro cytosine
  modified_base 11: mod_base = OTHER; note = 2'-O-methyl uridine
  modified_base 12: mod_base = OTHER; note = 2'-O-methyl guanosine
  modified_base 13: mod_base = OTHER; note = 2'-O-methyl cytosine
  modified_base 14: mod_base = OTHER; note = 2'-fluoro adenosine phosphorothioate
  modified_base 15: mod_base = OTHER; note = 2'-O-methyl guanosine phosphorothioate
  modified_base 16: mod_base = OTHER; note = 2'-O-methyl adenosine triethylene glycol
gcggtaaccctgcaga

SEQ ID NO: 939 - RNA, 16 nt, synthetic construct
  source 1..16: mol_type = other RNA
  modified_base 1: mod_base = OTHER; note = 2'-O-methyl guanosine phosphorothioate
  modified_base 2: mod_base = OTHER; note = 2'-O-methyl uridine phosphorothioate
  modified_base 3: mod_base = OTHER; note = 2'-O-methyl adenosine
  modified_base 4: mod_base = OTHER; note = 2'-fluoro adenosine
  modified_base 5: mod_base = OTHER; note = 2'-O-methyl cytosine
  modified_base 6: mod_base = OTHER; note = 2'-fluoro cytosine
  modified_base 7: mod_base = OTHER; note = 2'-O-methyl cytosine
  modified_base 8: mod_base = OTHER; note = 2'-fluoro uridine
  modified_base 9: mod_base = OTHER; note = 2'-O-methyl guanosine
  modified_base 10: mod_base = OTHER; note = 2'-fluoro cytosine
  modified_base 11: mod_base = OTHER; note = 2'-O-methyl adenosine
  modified_base 12: mod_base = OTHER; note = 2'-O-methyl guanosine
  modified_base 13: mod_base = OTHER; note = 2'-O-methyl cytosine
  modified_base 14: mod_base = OTHER; note = 2'-fluoro cytosine phosphorothioate
  modified_base 15: mod_base = OTHER; note = 2'-O-methyl uridine phosphorothioate
  modified_base 16: mod_base = OTHER; note = 2'-O-methyl adenosine triethylene glycol
gtaaccctgcagccta

SEQ ID NO: 940 - RNA, 16 nt, synthetic construct
  source 1..16: mol_type = other RNA
  modified_base 1: mod_base = OTHER; note = 2'-O-methyl uridine phosphorothioate
  modified_base 2: mod_base = OTHER; note = 2'-O-methyl adenosine phosphorothioate
  modified_base 3: mod_base = OTHER; note = 2'-O-methyl adenosine
  modified_base 4: mod_base = OTHER; note = 2'-fluoro cytosine
  modified_base 5: mod_base = OTHER; note = 2'-O-methyl cytosine
  modified_base 6: mod_base = OTHER; note = 2'-fluoro cytosine
  modified_base 7: mod_base = OTHER; note = 2'-O-methyl uridine
  modified_base 8: mod_base = OTHER; note = 2'-fluoro guanosine
  modified_base 9: mod_base = OTHER; note = 2'-O-methyl cytosine
  modified_base 10: mod_base = OTHER; note = 2'-fluoro adenosine
  modified_base 11: mod_base = OTHER; note = 2'-O-methyl guanosine
  modified_base 12: mod_base = OTHER; note = 2'-O-methyl cytosine
  modified_base 13: mod_base = OTHER; note = 2'-O-methyl cytosine
  modified_base 14: mod_base = OTHER; note = 2'-fluoro uridine phosphorothioate
  modified_base 15: mod_base = OTHER; note = 2'-O-methyl guanosine phosphorothioate
  modified_base 16: mod_base = OTHER; note = 2'-O-methyl adenosine triethylene glycol
taaccctgcagcctga

SEQ ID NO: 941 - RNA, 16 nt, synthetic construct
  source 1..16: mol_type = other RNA
  modified_base 1: mod_base = OTHER; note = 2'-O-methyl adenosine phosphorothioate
  modified_base 2: mod_base = OTHER; note = 2'-O-methyl cytosine phosphorothioate
  modified_base 3: mod_base = OTHER; note = 2'-O-methyl cytosine
  modified_base 4: mod_base = OTHER; note = 2'-fluoro cytosine
  modified_base 5: mod_base = OTHER; note = 2'-O-methyl uridine
  modified_base 6: mod_base = OTHER; note = 2'-fluoro guanosine
  modified_base 7: mod_base = OTHER; note = 2'-O-methyl cytosine
  modified_base 8: mod_base = OTHER; note = 2'-fluoro adenosine
  modified_base 9: mod_base = OTHER; note = 2'-O-methyl guanosine
  modified_base 10: mod_base = OTHER; note = 2'-fluoro cytosine
  modified_base 11: mod_base = OTHER; note = 2'-O-methyl cytosine
  modified_base 12: mod_base = OTHER; note = 2'-O-methyl uridine
  modified_base 13: mod_base = OTHER; note = 2'-O-methyl guanosine
  modified_base 14: mod_base = OTHER; note = 2'-fluoro cytosine phosphorothioate
  modified_base 15: mod_base = OTHER; note = 2'-O-methyl guanosine phosphorothioate
  modified_base 16: mod_base = OTHER; note = 2'-O-methyl adenosine triethylene glycol
accctgcagcctgcga

SEQ ID NO: 942 - DNA, 16 bp, synthetic construct
  source 1..16: mol_type = other DNA
  modified_base 1: mod_base = OTHER; note = 2'-O-methyl cytosine phosphorothioate
  modified_base 2: mod_base = OTHER; note = 2'-O-methyl cytosine phosphorothioate
  modified_base 3: mod_base = OTHER; note = 2'-O-methyl guanosine
  modified_base 4: mod_base = OTHER; note = 2'-fluoro guanosine
  modified_base 5: mod_base = OTHER; note = 2'-O-methyl cytosine
  modified_base 6: mod_base = OTHER; note = 2'-fluoro guanosine
  modified_base 7: mod_base = OTHER; note = 2'-O-methyl adenosine
  modified_base 8: mod_base = OTHER; note = 2'-fluoro cytosine
  modified_base 9: mod_base = OTHER; note = 2'-O-methyl adenosine
  modified_base 10: mod_base = OTHER; note = 2'-fluoro cytosine
  modified_base 11: mod_base = OTHER; note = 2'-O-methyl guanosine
  modified_base 12: mod_base = OTHER; note = 2'-O-methyl adenosine
  modified_base 13: mod_base = OTHER; note = 2'-O-methyl adenosine
  modified_base 14: mod_base = OTHER; note = 2'-fluoro cytosine phosphorothioate
  modified_base 15: mod_base = OTHER; note = 2'-O-methyl cytosine phosphorothioate
  modified_base 16: mod_base = OTHER; note = 2'-O-methyl adenosine triethylene glycol
ccggcgacacgaacca

SEQ ID NO: 943 - RNA, 16 nt, synthetic construct
  source 1..16: mol_type = other RNA
  modified_base 1: mod_base = OTHER; note = 2'-O-methyl guanosine phosphorothioate
  modified_base 2: mod_base = OTHER; note = 2'-O-methyl cytosine phosphorothioate
  modified_base 3: mod_base = OTHER; note = 2'-O-methyl adenosine
  modified_base 4: mod_base = OTHER; note = 2'-fluoro guanosine
  modified_base 5: mod_base = OTHER; note = 2'-O-methyl adenosine
  modified_base 6: mod_base = OTHER; note = 2'-fluoro guanosine
  modified_base 7: mod_base = OTHER; note = 2'-O-methyl adenosine
  modified_base 8: mod_base = OTHER; note = 2'-fluoro cytosine
  modified_base 9: mod_base = OTHER; note = 2'-O-methyl adenosine
  modified_base 10: mod_base = OTHER; note = 2'-fluoro guanosine
  modified_base 11: mod_base = OTHER; note = 2'-O-methyl adenosine
  modified_base 12: mod_base = OTHER; note = 2'-O-methyl guanosine
  modified_base 13: mod_base = OTHER; note = 2'-O-methyl uridine
  modified_base 14: mod_base = OTHER; note = 2'-fluoro guanosine phosphorothioate
  modified_base 15: mod_base = OTHER; note = 2'-O-methyl adenosine phosphorothioate
  modified_base 16: mod_base = OTHER; note = 2'-O-methyl adenosine triethylene glycol
gcagagacagagtgaa

SEQ ID NO: 944 - RNA, 16 nt, synthetic construct
  source 1..16: mol_type = other RNA
  modified_base 1: mod_base = OTHER; note = 2'-O-methyl guanosine phosphorothioate
  modified_base 2: mod_base = OTHER; note = 2'-O-methyl adenosine phosphorothioate
  modified_base 3: mod_base = OTHER; note = 2'-O-methyl guanosine
  modified_base 4: mod_base = OTHER; note = 2'-fluoro adenosine
  modified_base 5: mod_base = OTHER; note = 2'-O-methyl cytosine
  modified_base 6: mod_base = OTHER; note = 2'-fluoro adenosine
  modified_base 7: mod_base = OTHER; note = 2'-O-methyl guanosine
  modified_base 8: mod_base = OTHER; note = 2'-fluoro adenosine
  modified_base 9: mod_base = OTHER; note = 2'-O-methyl guanosine
  modified_base 10: mod_base = OTHER; note = 2'-fluoro uridine
  modified_base 11: mod_base = OTHER; note = 2'-O-methyl guanosine
  modified_base 12: mod_base = OTHER; note = 2'-O-methyl adenosine
  modified_base 13: mod_base = OTHER; note = 2'-O-methyl cytosine
  modified_base 14: mod_base = OTHER; note = 2'-fluoro cytosine phosphorothioate
  modified_base 15: mod_base = OTHER; note = 2'-O-methyl cytosine phosphorothioate
  modified_base 16: mod_base = OTHER; note = 2'-O-methyl adenosine triethylene glycol
gagacagagtgaccca

SEQ ID NO: 945 - RNA, 16 nt, synthetic construct
  source 1..16: mol_type = other RNA
  modified_base 1: mod_base = OTHER; note = 2'-O-methyl adenosine phosphorothioate
  modified_base 2: mod_base = OTHER; note = 2'-O-methyl guanosine phosphorothioate
  modified_base 3: mod_base = OTHER; note = 2'-O-methyl adenosine
  modified_base 4: mod_base = OTHER; note = 2'-fluoro guanosine
  modified_base 5: mod_base = OTHER; note = 2'-O-methyl uridine
  modified_base 6: mod_base = OTHER; note = 2'-fluoro guanosine
  modified_base 7: mod_base = OTHER; note = 2'-O-methyl adenosine
  modified_base 8: mod_base = OTHER; note = 2'-fluoro cytosine
  modified_base 9: mod_base = OTHER; note = 2'-O-methyl cytosine
  modified_base 10: mod_base = OTHER; note = 2'-fluoro cytosine
  modified_base 11: mod_base = OTHER; note = 2'-O-methyl adenosine
  modified_base 12: mod_base = OTHER; note = 2'-O-methyl guanosine
  modified_base 13: mod_base = OTHER; note = 2'-O-methyl cytosine
  modified_base 14: mod_base = OTHER; note = 2'-fluoro adenosine phosphorothioate
  modified_base 15: mod_base = OTHER; note = 2'-O-methyl adenosine phosphorothioate
  modified_base 16: mod_base = OTHER; note = 2'-O-methyl adenosine triethylene glycol
agagtgacccagcaaa

SEQ ID NO: 946 - RNA, 16 nt, synthetic construct
  source 1..16: mol_type = other RNA
  modified_base 1: mod_base = OTHER; note = 2'-O-methyl cytosine phosphorothioate
  modified_base 2: mod_base = OTHER; note = 2'-O-methyl cytosine phosphorothioate
  modified_base 3: mod_base = OTHER; note = 2'-O-methyl adenosine
  modified_base 4: mod_base = OTHER; note = 2'-fluoro guanosine
  modified_base 5: mod_base = OTHER; note = 2'-O-methyl adenosine
  modified_base 6: mod_base = OTHER; note = 2'-fluoro guanosine
  modified_base 7: mod_base = OTHER; note = 2'-O-methyl cytosine
  modified_base 8: mod_base = OTHER; note = 2'-fluoro cytosine
  modified_base 9: mod_base = OTHER; note = 2'-O-methyl cytosine
  modified_base 10: mod_base = OTHER; note = 2'-fluoro adenosine
  modified_base 11: mod_base = OTHER; note = 2'-O-methyl uridine
  modified_base 12: mod_base = OTHER; note = 2'-O-methyl guanosine
  modified_base 13: mod_base = OTHER; note = 2'-O-methyl adenosine
  modified_base 14: mod_base = OTHER; note = 2'-fluoro guanosine phosphorothioate
  modified_base 15: mod_base = OTHER; note = 2'-O-methyl guanosine phosphorothioate
  modified_base 16: mod_base = OTHER; note = 2'-O-methyl adenosine triethylene glycol
ccagagcccatgagga

SEQ ID NO: 947 - RNA, 16 nt, synthetic construct
  source 1..16: mol_type = other RNA
  modified_base 1: mod_base = OTHER; note = 2'-O-methyl cytosine phosphorothioate
  modified_base 2: mod_base = OTHER; note = 2'-O-methyl cytosine phosphorothioate
  modified_base 3: mod_base = OTHER; note = 2'-O-methyl adenosine
  modified_base 4: mod_base = OTHER; note = 2'-fluoro uridine
  modified_base 5: mod_base = OTHER; note = 2'-O-methyl guanosine
  modified_base 6: mod_base = OTHER; note = 2'-fluoro adenosine
  modified_base 7: mod_base = OTHER; note = 2'-O-methyl guanosine
  modified_base 8: mod_base = OTHER; note = 2'-fluoro guanosine
  modified_base 9: mod_base = OTHER; note = 2'-O-methyl guanosine
  modified_base 10: mod_base = OTHER; note = 2'-fluoro adenosine
  modified_base 11: mod_base = OTHER; note = 2'-O-methyl cytosine
  modified_base 12: mod_base = OTHER; note = 2'-O-methyl adenosine
  modified_base 13: mod_base = OTHER; note = 2'-O-methyl cytosine
  modified_base 14: mod_base = OTHER; note = 2'-fluoro cytosine phosphorothioate
  modified_base 15: mod_base = OTHER; note = 2'-O-methyl cytosine phosphorothioate
  modified_base 16: mod_base = OTHER; note = 2'-O-methyl adenosine triethylene glycol
ccatgagggacaccca

SEQ ID NO: 948 - RNA, 16 nt, synthetic construct
  source 1..16: mol_type = other RNA
  modified_base 1: mod_base = OTHER; note = 2'-O-methyl cytosine phosphorothioate
  modified_base 2: mod_base = OTHER; note = 2'-O-methyl cytosine phosphorothioate
  modified_base 3: mod_base = OTHER; note = 2'-O-methyl cytosine
  modified_base 4: mod_base = OTHER; note = 2'-fluoro cytosine
  modified_base 5: mod_base = OTHER; note = 2'-O-methyl guanosine
  modified_base 6: mod_base = OTHER; note = 2'-fluoro cytosine
  modified_base 7: mod_base = OTHER; note = 2'-O-methyl uridine
  modified_base 8: mod_base = OTHER; note = 2'-fluoro cytosine
  modified_base 9: mod_base = OTHER; note = 2'-O-methyl cytosine
  modified_base 10: mod_base = OTHER; note = 2'-fluoro cytosine
  modified_base 11: mod_base = OTHER; note = 2'-O-methyl uridine
  modified_base 12: mod_base = OTHER; note = 2'-O-methyl cytosine
  modified_base 13: mod_base = OTHER; note = 2'-O-methyl adenosine
  modified_base 14: mod_base = OTHER; note = 2'-fluoro cytosine phosphorothioate
  modified_base 15: mod_base = OTHER; note = 2'-O-methyl uridine phosphorothioate
  modified_base 16: mod_base = OTHER; note = 2'-O-methyl adenosine triethylene glycol
ccccgctccctcacta

SEQ ID NO: 949 - RNA, 16 nt, synthetic construct
  source 1..16: mol_type = other RNA
  modified_base 1: mod_base = OTHER; note = 2'-O-methyl cytosine phosphorothioate
  modified_base 2: mod_base = OTHER; note = 2'-O-methyl cytosine phosphorothioate
  modified_base 3: mod_base = OTHER; note = 2'-O-methyl cytosine
  modified_base 4: mod_base = OTHER; note = 2'-fluoro guanosine
  modified_base 5: mod_base = OTHER; note = 2'-O-methyl cytosine
  modified_base 6: mod_base = OTHER; note = 2'-fluoro uridine
  modified_base 7: mod_base = OTHER; note = 2'-O-methyl cytosine
  modified_base 8: mod_base = OTHER; note = 2'-fluoro cytosine
  modified_base 9: mod_base = OTHER; note = 2'-O-methyl cytosine
  modified_base 10: mod_base = OTHER; note = 2'-fluoro uridine
  modified_base 11: mod_base = OTHER; note = 2'-O-methyl cytosine
  modified_base 12: mod_base = OTHER; note = 2'-O-methyl adenosine
  modified_base 13: mod_base = OTHER; note = 2'-O-methyl cytosine
  modified_base 14: mod_base = OTHER; note = 2'-fluoro uridine phosphorothioate
  modified_base 15: mod_base = OTHER; note = 2'-O-methyl uridine phosphorothioate
  modified_base 16: mod_base = OTHER; note = 2'-O-methyl adenosine triethylene glycol
cccgctccctcactta

SEQ ID NO: 950 - RNA, 16 nt, synthetic construct
  source 1..16: mol_type = other RNA
  modified_base 1: mod_base = OTHER; note = 2'-O-methyl cytosine phosphorothioate
  modified_base 2: mod_base = OTHER; note = 2'-O-methyl cytosine phosphorothioate
  modified_base 3: mod_base = OTHER; note = 2'-O-methyl guanosine
  modified_base 4: mod_base = OTHER; note = 2'-fluoro cytosine
  modified_base 5: mod_base = OTHER; note = 2'-O-methyl uridine
  modified_base 6: mod_base = OTHER; note = 2'-fluoro cytosine
  modified_base 7: mod_base = OTHER; note = 2'-O-methyl cytosine
  modified_base 8: mod_base = OTHER; note = 2'-fluoro cytosine
  modified_base 9: mod_base = OTHER; note = 2'-O-methyl uridine
  modified_base 10: mod_base = OTHER; note = 2'-fluoro cytosine
  modified_base 11: mod_base = OTHER; note = 2'-O-methyl adenosine
  modified_base 12: mod_base = OTHER; note = 2'-O-methyl cytosine
  modified_base 13: mod_base = OTHER; note = 2'-O-methyl uridine
  modified_base 14: mod_base = OTHER; note = 2'-fluoro uridine phosphorothioate
  modified_base 15: mod_base = OTHER; note = 2'-O-methyl guanosine phosphorothioate
  modified_base 16: mod_base = OTHER; note = 2'-O-methyl adenosine triethylene glycol
ccgctccctcacttga

SEQ ID NO: 951 - RNA, 16 nt, synthetic construct
  source 1..16: mol_type = other RNA
  modified_base 1: mod_base = OTHER; note = 2'-O-methyl cytosine phosphorothioate
  modified_base 2: mod_base = OTHER; note = 2'-O-methyl guanosine phosphorothioate
  modified_base 3: mod_base = OTHER; note = 2'-O-methyl cytosine
  modified_base 4: mod_base = OTHER; note = 2'-fluoro uridine
  modified_base 5: mod_base = OTHER; note = 2'-O-methyl cytosine
  modified_base 6: mod_base = OTHER; note = 2'-fluoro cytosine
  modified_base 7: mod_base = OTHER; note = 2'-O-methyl cytosine
  modified_base 8: mod_base = OTHER; note = 2'-fluoro uridine
  modified_base 9: mod_base = OTHER; note = 2'-O-methyl cytosine
  modified_base 10: mod_base = OTHER; note = 2'-fluoro adenosine
  modified_base 11: mod_base = OTHER; note = 2'-O-methyl cytosine
  modified_base 12: mod_base = OTHER; note = 2'-O-methyl uridine
  modified_base 13: mod_base = OTHER; note = 2'-O-methyl uridine
  modified_base 14: mod_base = OTHER; note = 2'-fluoro guanosine phosphorothioate
  modified_base 15: mod_base = OTHER; note = 2'-O-methyl guanosine phosphorothioate
  modified_base 16: mod_base = OTHER; note = 2'-O-methyl adenosine triethylene glycol
cgctccctcacttgga

SEQ ID NO: 952 - RNA, 16 nt, synthetic construct
  source 1..16: mol_type = other RNA
  modified_base 1: mod_base = OTHER; note = 2'-O-methyl cytosine phosphorothioate
  modified_base 2: mod_base = OTHER; note = 2'-O-methyl uridine phosphorothioate
  modified_base 3: mod_base = OTHER; note = 2'-O-methyl cytosine
  modified_base 4: mod_base = OTHER; note = 2'-fluoro cytosine
  modified_base 5: mod_base = OTHER; note = 2'-O-methyl cytosine
  modified_base 6: mod_base = OTHER; note = 2'-fluoro uridine
  modified_base 7: mod_base = OTHER; note = 2'-O-methyl cytosine
  modified_base 8: mod_base = OTHER; note = 2'-fluoro adenosine
  modified_base 9: mod_base = OTHER; note = 2'-O-methyl cytosine
  modified_base 10: mod_base = OTHER; note = 2'-fluoro uridine
  modified_base 11: mod_base = OTHER; note = 2'-O-methyl uridine
  modified_base 12: mod_base = OTHER; note = 2'-O-methyl guanosine
  modified_base 13: mod_base = OTHER; note = 2'-O-methyl guanosine
  modified_base 14: mod_base = OTHER; note = 2'-fluoro guanosine phosphorothioate
  modified_base 15: mod_base = OTHER; note = 2'-O-methyl uridine phosphorothioate
  modified_base 16: mod_base = OTHER; note = 2'-O-methyl adenosine triethylene glycol
ctccctcacttgggta

SEQ ID NO: 953 - RNA, 16 nt, synthetic construct
  source 1..16: mol_type = other RNA
  modified_base 1: mod_base = OTHER; note = 2'-O-methyl cytosine phosphorothioate
  modified_base 2: mod_base = OTHER; note = 2'-O-methyl cytosine phosphorothioate
  modified_base 3: mod_base = OTHER; note = 2'-O-methyl cytosine
  modified_base 4: mod_base = OTHER; note = 2'-fluoro uridine
  modified_base 5: mod_base = OTHER; note = 2'-O-methyl cytosine
  modified_base 6: mod_base = OTHER; note = 2'-fluoro adenosine
  modified_base 7: mod_base = OTHER; note = 2'-O-methyl cytosine
  modified_base 8: mod_base = OTHER; note = 2'-fluoro uridine
  modified_base 9: mod_base = OTHER; note = 2'-O-methyl uridine
  modified_base 10: mod_base = OTHER; note = 2'-fluoro guanosine
  modified_base 11: mod_base = OTHER; note = 2'-O-methyl guanosine
  modified_base 12: mod_base = OTHER; note = 2'-O-methyl guanosine
  modified_base 13: mod_base = OTHER; note = 2'-O-methyl uridine
  modified_base 14: mod_base = OTHER; note = 2'-fluoro cytosine phosphorothioate
  modified_base 15: mod_base = OTHER; note = 2'-O-methyl uridine phosphorothioate
  modified_base 16: mod_base = OTHER; note = 2'-O-methyl adenosine triethylene glycol
ccctcacttgggtcta

SEQ ID NO: 954 - RNA, 16 nt, synthetic construct
  source 1..16: mol_type = other RNA
  modified_base 1: mod_base = OTHER; note = 2'-O-methyl cytosine phosphorothioate
  modified_base 2: mod_base = OTHER; note = 2'-O-methyl cytosine phosphorothioate
  modified_base 3: mod_base = OTHER; note = 2'-O-methyl uridine
  modified_base 4: mod_base = OTHER; note = 2'-fluoro cytosine
  modified_base 5: mod_base = OTHER; note = 2'-O-methyl adenosine
  modified_base 6: mod_base = OTHER; note = 2'-fluoro cytosine
  modified_base 7: mod_base = OTHER; note = 2'-O-methyl uridine
  modified_base 8: mod_base = OTHER; note = 2'-fluoro uridine
  modified_base 9: mod_base = OTHER; note = 2'-O-methyl guanosine
  modified_base 10: mod_base = OTHER; note = 2'-fluoro guanosine
  modified_base 11: mod_base = OTHER; note = 2'-O-methyl guanosine
  modified_base 12: mod_base = OTHER; note = 2'-O-methyl uridine
  modified_base 13: mod_base = OTHER; note = 2'-O-methyl cytosine
  modified_base 14: mod_base = OTHER; note = 2'-fluoro uridine phosphorothioate
  modified_base 15: mod_base = OTHER; note = 2'-O-methyl uridine phosphorothioate
  modified_base 16: mod_base = OTHER; note = 2'-O-methyl adenosine triethylene glycol
cctcacttgggtctta

SEQ ID NO: 955 - RNA, 16 nt, synthetic construct
  source 1..16: mol_type = other RNA
  modified_base 1: mod_base = OTHER; note = 2'-O-methyl uridine phosphorothioate
  modified_base 2: mod_base = OTHER; note = 2'-O-methyl cytosine phosphorothioate
  modified_base 3: mod_base = OTHER; note = 2'-O-methyl adenosine
  modified_base 4: mod_base = OTHER; note = 2'-fluoro cytosine
  modified_base 5: mod_base = OTHER; note = 2'-O-methyl uridine
  modified_base 6: mod_base = OTHER; note = 2'-fluoro uridine
  modified_base 7: mod_base = OTHER; note = 2'-O-methyl guanosine
  modified_base 8: mod_base = OTHER; note = 2'-fluoro guanosine
  modified_base 9: mod_base = OTHER; note = 2'-O-methyl guanosine
  modified_base 10: mod_base = OTHER; note = 2'-fluoro uridine
  modified_base 11: mod_base = OTHER; note = 2'-O-methyl cytosine
  modified_base 12: mod_base = OTHER; note = 2'-O-methyl uridine
  modified_base 13: mod_base = OTHER; note = 2'-O-methyl uridine
  modified_base 14: mod_base = OTHER; note = 2'-fluoro cytosine phosphorothioate
  modified_base 15: mod_base = OTHER; note = 2'-O-methyl cytosine phosphorothioate
  modified_base 16: mod_base = OTHER; note = 2'-O-methyl adenosine triethylene glycol
tcacttgggtcttcca

SEQ ID NO: 956 - RNA, 16 nt, synthetic construct
  source 1..16: mol_type = other RNA
  modified_base 1: mod_base = OTHER; note = 2'-O-methyl guanosine phosphorothioate
  modified_base 2: mod_base = OTHER; note = 2'-O-methyl guanosine phosphorothioate
  modified_base 3: mod_base = OTHER; note = 2'-O-methyl guanosine
  modified_base 4: mod_base = OTHER; note = 2'-fluoro uridine
  modified_base 5: mod_base = OTHER; note = 2'-O-methyl cytosine
  modified_base 6: mod_base = OTHER; note = 2'-fluoro uridine
  modified_base 7: mod_base = OTHER; note = 2'-O-methyl uridine
  modified_base 8: mod_base = OTHER; note = 2'-fluoro cytosine
  modified_base 9: mod_base = OTHER; note = 2'-O-methyl cytosine
  modified_base 10: mod_base = OTHER; note = 2'-fluoro cytosine
  modified_base 11: mod_base = OTHER; note = 2'-O-methyl uridine
  modified_base 12: mod_base = OTHER; note = 2'-O-methyl uridine
  modified_base 13: mod_base = OTHER; note = 2'-O-methyl guanosine
  modified_base 14: mod_base = OTHER; note = 2'-fluoro uridine phosphorothioate
  modified_base 15: mod_base = OTHER; note = 2'-O-methyl cytosine phosphorothioate
  modified_base 16: mod_base = OTHER; note = 2'-O-methyl adenosine triethylene glycol
gggtcttcccttgtca

SEQ ID NO: 957 - RNA, 16 nt, synthetic construct
  source 1..16: mol_type = other RNA
  modified_base 1: mod_base = OTHER; note = 2'-O-methyl uridine phosphorothioate
  modified_base 2: mod_base = OTHER; note = 2'-O-methyl cytosine phosphorothioate
  modified_base 3: mod_base = OTHER; note = 2'-O-methyl uridine
  modified_base 4: mod_base = OTHER; note = 2'-fluoro uridine
  modified_base 5: mod_base = OTHER; note = 2'-O-methyl cytosine
  modified_base 6: mod_base = OTHER; note = 2'-fluoro cytosine
  modified_base 7: mod_base = OTHER; note = 2'-O-methyl cytosine
  modified_base 8: mod_base = OTHER; note = 2'-fluoro uridine
  modified_base 9: mod_base = OTHER; note = 2'-O-methyl uridine
  modified_base 10: mod_base = OTHER; note = 2'-fluoro guanosine
  modified_base 11: mod_base = OTHER; note = 2'-O-methyl uridine
  modified_base 12: mod_base = OTHER; note = 2'-O-methyl cytosine
  modified_base 13: mod_base = OTHER; note = 2'-O-methyl cytosine
  modified_base 14: mod_base = OTHER; note = 2'-fluoro uridine phosphorothioate
  modified_base 15: mod_base = OTHER; note = 2'-O-methyl cytosine phosphorothioate
  modified_base 16: mod_base = OTHER; note = 2'-O-methyl adenosine triethylene glycol
tcttcccttgtcctca

SEQ ID NO: 958 - RNA, 16 nt, synthetic construct
  source 1..16: mol_type = other RNA
  modified_base 1: mod_base = OTHER; note = 2'-O-methyl cytosine phosphorothioate
  modified_base 2: mod_base = OTHER; note = 2'-O-methyl cytosine phosphorothioate
  modified_base 3: mod_base = OTHER; note = 2'-O-methyl cytosine
  modified_base 4: mod_base = OTHER; note = 2'-fluoro uridine
  modified_base 5: mod_base = OTHER; note = 2'-O-methyl uridine
  modified_base 6: mod_base = OTHER; note = 2'-fluoro guanosine
  modified_base 7: mod_base = OTHER; note = 2'-O-methyl uridine
  modified_base 8: mod_base = OTHER; note = 2'-fluoro cytosine
  modified_base 9: mod_base = OTHER; note = 2'-O-methyl cytosine
  modified_base 10: mod_base = OTHER; note = 2'-fluoro uridine
  modified_base 11: mod_base = OTHER; note = 2'-O-methyl cytosine
  modified_base 12: mod_base = OTHER; note = 2'-O-methyl uridine
  modified_base 13: mod_base = OTHER; note = 2'-O-methyl cytosine
  modified_base 14: mod_base = OTHER; note = 2'-fluoro guanosine phosphorothioate
  modified_base 15: mod_base = OTHER; note = 2'-O-methyl cytosine phosphorothioate
  modified_base 16: mod_base = OTHER; note = 2'-O-methyl adenosine triethylene glycol
cccttgtcctctcgca

SEQ ID NO: 959 - RNA, 16 nt, synthetic construct
  source 1..16: mol_type = other RNA
  modified_base 1: mod_base = OTHER; note = 2'-O-methyl cytosine phosphorothioate
  modified_base 2: mod_base = OTHER; note = 2'-O-methyl cytosine phosphorothioate
  modified_base 3: mod_base = OTHER; note = 2'-O-methyl uridine
  modified_base 4: mod_base = OTHER; note = 2'-fluoro uridine
  modified_base 5: mod_base = OTHER; note = 2'-O-methyl guanosine
  modified_base 6: mod_base = OTHER; note = 2'-fluoro uridine
  modified_base 7: mod_base = OTHER; note = 2'-O-methyl cytosine
  modified_base 8: mod_base = OTHER; note = 2'-fluoro cytosine
  modified_base 9: mod_base = OTHER; note = 2'-O-methyl uridine
  modified_base 10: mod_base = OTHER; note = 2'-fluoro cytosine
  modified_base 11: mod_base = OTHER; note = 2'-O-methyl uridine
  modified_base 12: mod_base = OTHER; note = 2'-O-methyl cytosine
  modified_base 13: mod_base = OTHER; note = 2'-O-methyl guanosine
  modified_base 14: mod_base = OTHER; note = 2'-fluoro cytosine phosphorothioate
  modified_base 15: mod_base = OTHER; note = 2'-O-methyl guanosine phosphorothioate
  modified_base 16: mod_base = OTHER; note = 2'-O-methyl adenosine triethylene glycol
ccttgtcctctcgcga

SEQ ID NO: 960 - RNA, 16 nt, synthetic construct
  source 1..16: mol_type = other RNA
  modified_base 1: mod_base = OTHER; note = 2'-O-methyl cytosine phosphorothioate
  modified_base 2: mod_base = OTHER; note = 2'-O-methyl uridine phosphorothioate
  modified_base 3: mod_base = OTHER; note = 2'-O-methyl uridine
  modified_base 4: mod_base = OTHER; note = 2'-fluoro guanosine
  modified_base 5: mod_base = OTHER; note = 2'-O-methyl uridine
  modified_base 6: mod_base = OTHER; note = 2'-fluoro cytosine
  modified_base 7: mod_base = OTHER; note = 2'-O-methyl cytosine
  modified_base 8: mod_base = OTHER; note = 2'-fluoro uridine
  modified_base 9: mod_base = OTHER; note = 2'-O-methyl cytosine
  modified_base 10: mod_base = OTHER; note = 2'-fluoro uridine
  modified_base 11: mod_base = OTHER; note = 2'-O-methyl cytosine
  modified_base 12: mod_base = OTHER; note = 2'-O-methyl guanosine
  modified_base 13: mod_base = OTHER; note = 2'-O-methyl cytosine
  modified_base 14: mod_base = OTHER; note = 2'-fluoro guanosine phosphorothioate
  modified_base 15: mod_base = OTHER; note = 2'-O-methyl adenosine phosphorothioate
  modified_base 16: mod_base = OTHER; note = 2'-O-methyl adenosine triethylene glycol
cttgtcctctcgcgaa

SEQ ID NO: 961 - RNA, 16 nt, synthetic construct
  source 1..16: mol_type = other RNA
  modified_base 1: mod_base = OTHER; note = 2'-O-methyl uridine phosphorothioate
  modified_base 2: mod_base = OTHER; note = 2'-O-methyl uridine phosphorothioate
  modified_base 3: mod_base = OTHER; note = 2'-O-methyl guanosine
  modified_base 4: mod_base = OTHER; note = 2'-fluoro uridine
  modified_base 5: mod_base = OTHER; note = 2'-O-methyl cytosine
  modified_base 6: mod_base = OTHER; note = 2'-fluoro cytosine
  modified_base 7: mod_base = OTHER; note = 2'-O-methyl uridine
  modified_base 8: mod_base = OTHER; note = 2'-fluoro cytosine
  modified_base 9: mod_base = OTHER; note = 2'-O-methyl uridine
  modified_base 10: mod_base = OTHER; note = 2'-fluoro cytosine
  modified_base 11: mod_base = OTHER; note = 2'-O-methyl guanosine
  modified_base 12: mod_base = OTHER; note = 2'-O-methyl cytosine
  modified_base 13: mod_base = OTHER; note = 2'-O-methyl guanosine
  modified_base 14: mod_base = OTHER; note = 2'-fluoro adenosine phosphorothioate
  modified_base 15: mod_base = OTHER; note = 2'-O-methyl guanosine phosphorothioate
  modified_base 16: mod_base = OTHER; note = 2'-O-methyl adenosine triethylene glycol
ttgtcctctcgcgaga

SEQ ID NO: 962 - RNA, 16 nt, synthetic construct
  source 1..16: mol_type = other RNA
  modified_base 1: mod_base = OTHER; note = 2'-O-methyl guanosine phosphorothioate
  modified_base 2: mod_base = OTHER; note = 2'-O-methyl guanosine phosphorothioate
  modified_base 3: mod_base = OTHER; note = 2'-O-methyl adenosine
  modified_base 4: mod_base = OTHER; note = 2'-fluoro guanosine
  modified_base 5: mod_base = OTHER; note = 2'-O-methyl guanosine
  modified_base 6: mod_base = OTHER; note = 2'-fluoro cytosine
  modified_base 7: mod_base = OTHER; note = 2'-O-methyl adenosine
  modified_base 8: mod_base = OTHER; note = 2'-fluoro guanosine
  modified_base 9: mod_base = OTHER; note = 2'-O-methyl adenosine
  modified_base 10: mod_base = OTHER; note = 2'-fluoro guanosine
  modified_base 11: mod_base = OTHER; note = 2'-O-methyl cytosine
  modified_base 12: mod_base = OTHER; note = 2'-O-methyl cytosine
  modified_base 13: mod_base = OTHER; note = 2'-O-methyl uridine
  modified_base 14: mod_base = OTHER; note = 2'-fluoro uridine phosphorothioate
  modified_base 15: mod_base = OTHER; note = 2'-O-methyl guanosine phosphorothioate
  modified_base 16: mod_base = OTHER; note = 2'-O-methyl adenosine triethylene glycol
ggaggcagagccttga

SEQ ID NO: 963 - RNA, 16 nt, synthetic construct
  source 1..16: mol_type = other RNA
  modified_base 1: mod_base = OTHER; note = 2'-O-methyl guanosine phosphorothioate
  modified_base 2: mod_base = OTHER; note = 2'-O-methyl adenosine phosphorothioate
  modified_base 3: mod_base = OTHER; note = 2'-O-methyl guanosine
  modified_base 4: mod_base = OTHER; note = 2'-fluoro guanosine
  modified_base 5: mod_base = OTHER; note = 2'-O-methyl cytosine
  modified_base 6: mod_base = OTHER; note = 2'-fluoro adenosine
  modified_base 7: mod_base = OTHER; note = 2'-O-methyl guanosine
  modified_base 8: mod_base = OTHER; note = 2'-fluoro adenosine
  modified_base 9: mod_base = OTHER; note = 2'-O-methyl guanosine
  modified_base 10: mod_base = OTHER; note = 2'-fluoro cytosine
  modified_base 11: mod_base = OTHER; note = 2'-O-methyl cytosine
  modified_base 12: mod_base = OTHER; note = 2'-O-methyl uridine
  modified_base 13: mod_base = OTHER; note = 2'-O-methyl uridine
  modified_base 14: mod_base = OTHER; note = 2'-fluoro guanosine phosphorothioate
  modified_base 15: mod_base = OTHER; note = 2'-O-methyl uridine phosphorothioate
  modified_base 16: mod_base = OTHER; note = 2'-O-methyl adenosine triethylene glycol
gaggcagagccttgta

SEQ ID NO: 964 - RNA, 16 nt, synthetic construct
  source 1..16: mol_type = other RNA
  modified_base 1: mod_base = OTHER; note = 2'-O-methyl guanosine phosphorothioate
  modified_base 2: mod_base = OTHER; note = 2'-O-methyl guanosine phosphorothioate
  modified_base 3: mod_base = OTHER; note = 2'-O-methyl cytosine
  modified_base 4: mod_base = OTHER; note = 2'-fluoro adenosine
  modified_base 5: mod_base = OTHER; note = 2'-O-methyl guanosine
  modified_base 6: mod_base = OTHER; note = 2'-fluoro adenosine
  modified_base 7: mod_base = OTHER; note = 2'-O-methyl guanosine
  modified_base 8: mod_base = OTHER; note = 2'-fluoro cytosine
  modified_base 9: mod_base = OTHER; note = 2'-O-methyl cytosine
  modified_base 10: mod_base = OTHER; note = 2'-fluoro uridine
  modified_base 11: mod_base = OTHER; note = 2'-O-methyl uridine
  modified_base 12: mod_base = OTHER; note = 2'-O-methyl guanosine
  modified_base 13: mod_base = OTHER; note = 2'-O-methyl uridine
  modified_base 14: mod_base = OTHER; note = 2'-fluoro uridine phosphorothioate
  modified_base 15: mod_base = OTHER; note = 2'-O-methyl guanosine phosphorothioate
  modified_base 16: mod_base = OTHER; note = 2'-O-methyl adenosine triethylene glycol
ggcagagccttgttga

SEQ ID NO: 965 - RNA, 16 nt, synthetic construct
  source 1..16: mol_type = other RNA
  modified_base 1: mod_base = OTHER; note = 2'-O-methyl guanosine phosphorothioate
  modified_base 2: mod_base = OTHER; note = 2'-O-methyl cytosine phosphorothioate
  modified_base 3: mod_base = OTHER; note = 2'-O-methyl adenosine
  modified_base 4: mod_base = OTHER; note = 2'-fluoro guanosine
  modified_base 5: mod_base = OTHER; note = 2'-O-methyl adenosine
  modified_base 6: mod_base = OTHER; note = 2'-fluoro guanosine
  modified_base 7: mod_base = OTHER; note = 2'-O-methyl cytosine
  modified_base 8: mod_base = OTHER; note = 2'-fluoro cytosine
  modified_base 9: mod_base = OTHER; note = 2'-O-methyl uridine
  modified_base 10: mod_base = OTHER; note = 2'-fluoro uridine
  modified_base 11: mod_base = OTHER; note = 2'-O-methyl guanosine
  modified_base 12: mod_base = OTHER; note = 2'-O-methyl uridine
  modified_base 13: mod_base = OTHER; note = 2'-O-methyl uridine
  modified_base 14: mod_base = OTHER; note = 2'-fluoro guanosine phosphorothioate
  modified_base 15: mod_base = OTHER; note = 2'-O-methyl guanosine phosphorothioate
  modified_base 16: mod_base = OTHER; note = 2'-O-methyl adenosine triethylene glycol
gcagagccttgttgga

SEQ ID NO: 966 - RNA, 16 nt, synthetic construct
  source 1..16: mol_type = other RNA
  modified_base 1: mod_base = OTHER; note = 2'-O-methyl cytosine phosphorothioate
  modified_base 2: mod_base = OTHER; note = 2'-O-methyl adenosine phosphorothioate
  modified_base 3: mod_base = OTHER; note = 2'-O-methyl guanosine
  modified_base 4: mod_base = OTHER; note = 2'-fluoro adenosine
  modified_base 5: mod_base = OTHER; note = 2'-O-methyl guanosine
  modified_base 6: mod_base = OTHER; note = 2'-fluoro cytosine
  modified_base 7: mod_base = OTHER; note = 2'-O-methyl cytosine
  modified_base 8: mod_base = OTHER; note = 2'-fluoro uridine
  modified_base 9: mod_base = OTHER; note = 2'-O-methyl uridine
  modified_base 10: mod_base = OTHER; note = 2'-fluoro guanosine
  modified_base 11: mod_base = OTHER; note = 2'-O-methyl uridine
  modified_base 12: mod_base = OTHER; note = 2'-O-methyl uridine
  modified_base 13: mod_base = OTHER; note = 2'-O-methyl guanosine
  modified_base 14: mod_base = OTHER; note = 2'-fluoro guanosine phosphorothioate
  modified_base 15: mod_base = OTHER; note = 2'-O-methyl guanosine phosphorothioate
  modified_base 16: mod_base = OTHER; note = 2'-O-methyl adenosine triethylene glycol
cagagccttgttggga

SEQ ID NO: 967 - RNA, 16 nt, synthetic construct
  source 1..16: mol_type = other RNA
  modified_base 1: mod_base = OTHER; note = 2'-O-methyl adenosine phosphorothioate
  modified_base 2: mod_base = OTHER; note = 2'-O-methyl guanosine phosphorothioate
  modified_base 3: mod_base = OTHER; note = 2'-O-methyl adenosine
  modified_base 4: mod_base = OTHER; note = 2'-fluoro guanosine
  modified_base 5: mod_base = OTHER; note = 2'-O-methyl cytosine
  modified_base 6: mod_base = OTHER; note = 2'-fluoro cytosine
  modified_base 7: mod_base = OTHER; note = 2'-O-methyl uridine
  modified_base 8: mod_base = OTHER; note = 2'-fluoro uridine
  modified_base 9: mod_base = OTHER; note = 2'-O-methyl guanosine
  modified_base 10: mod_base = OTHER; note = 2'-fluoro uridine
  modified_base 11: mod_base = OTHER; note = 2'-O-methyl uridine
  modified_base 12: mod_base = OTHER; note = 2'-O-methyl guanosine
  modified_base 13: mod_base = OTHER; note = 2'-O-methyl guanosine
  modified_base 14: mod_base = OTHER; note = 2'-fluoro guanosine phosphorothioate
  modified_base 15: mod_base = OTHER; note = 2'-O-methyl guanosine phosphorothioate
  modified_base 16: mod_base = OTHER; note = 2'-O-methyl adenosine triethylene glycol
agagccttgttgggga

SEQ ID NO: 968 - RNA, 16 nt, synthetic construct
  source 1..16: mol_type = other RNA
  modified_base 1: mod_base = OTHER; note = 2'-O-methyl cytosine phosphorothioate
  modified_base 2: mod_base = OTHER; note = 2'-O-methyl cytosine phosphorothioate
  modified_base 3: mod_base = OTHER; note = 2'-O-methyl uridine
  modified_base 4: mod_base = OTHER; note = 2'-fluoro uridine
  modified_base 5: mod_base = OTHER; note = 2'-O-methyl guanosine
  modified_base 6: mod_base = OTHER; note = 2'-fluoro uridine
  modified_base 7: mod_base = OTHER; note = 2'-O-methyl uridine
  modified_base 8: mod_base = OTHER; note = 2'-fluoro guanosine
  modified_base 9: mod_base = OTHER; note = 2'-O-methyl guanosine
  modified_base 10: mod_base = OTHER; note = 2'-fluoro guanosine
  modified_base 11: mod_base = OTHER; note = 2'-O-methyl guanosine
  modified_base 12: mod_base = OTHER; note = 2'-O-methyl cytosine
  modified_base 13: mod_base = OTHER; note = 2'-O-methyl cytosine
  modified_base 14: mod_base = OTHER; note = 2'-fluoro uridine phosphorothioate
  modified_base 15: mod_base = OTHER; note = 2'-O-methyl guanosine phosphorothioate
  modified_base 16: mod_base = OTHER; note = 2'-O-methyl adenosine triethylene glycol
ccttgttggggcctga

SEQ ID NO: 969 - RNA, 16 nt, synthetic construct
  source 1..16: mol_type = other RNA
  modified_base 1: mod_base = OTHER; note = 2'-O-methyl cytosine phosphorothioate
  modified_base 2: mod_base = OTHER; note = 2'-O-methyl uridine phosphorothioate
  modified_base 3: mod_base = OTHER; note = 2'-O-methyl uridine
  modified_base 4: mod_base = OTHER; note = 2'-fluoro guanosine
  modified_base 5: mod_base = OTHER; note = 2'-O-methyl uridine
  modified_base 6: mod_base = OTHER; note = 2'-fluoro uridine
  modified_base 7: mod_base = OTHER; note = 2'-O-methyl guanosine
  modified_base 8: mod_base = OTHER; note = 2'-fluoro guanosine
  modified_base 9: mod_base = OTHER; note = 2'-O-methyl guanosine
  modified_base 10: mod_base = OTHER; note = 2'-fluoro guanosine
  modified_base 11: mod_base = OTHER; note = 2'-O-methyl cytosine
  modified_base 12: mod_base = OTHER; note = 2'-O-methyl cytosine
  modified_base 13: mod_base = OTHER; note = 2'-O-methyl uridine
  modified_base 14: mod_base = OTHER; note = 2'-fluoro guanosine phosphorothioate
  modified_base 15: mod_base = OTHER; note = 2'-O-methyl uridine phosphorothioate
  modified_base 16: mod_base = OTHER; note = 2'-O-methyl adenosine triethylene glycol
cttgttggggcctgta

SEQ ID NO: 970 - RNA, 16 nt, synthetic construct
  source 1..16: mol_type = other RNA
  modified_base 1: mod_base = OTHER; note = 2'-O-methyl uridine phosphorothioate
  modified_base 2: mod_base = OTHER; note = 2'-O-methyl uridine phosphorothioate
  modified_base 3: mod_base = OTHER; note = 2'-O-methyl guanosine
  modified_base 4: mod_base = OTHER; note = 2'-fluoro uridine
  modified_base 5: mod_base = OTHER; note = 2'-O-methyl uridine
  modified_base 6: mod_base = OTHER; note = 2'-fluoro guanosine
  modified_base 7: mod_base = OTHER; note = 2'-O-methyl guanosine
  modified_base 8: mod_base = OTHER; note = 2'-fluoro guanosine
  modified_base 9: mod_base = OTHER; note = 2'-O-methyl guanosine
  modified_base 10: mod_base = OTHER; note = 2'-fluoro cytosine
  modified_base 11: mod_base = OTHER; note = 2'-O-methyl cytosine
  modified_base 12: mod_base = OTHER; note = 2'-O-methyl uridine
  modified_base 13: mod_base = OTHER; note = 2'-O-methyl guanosine
  modified_base 14: mod_base = OTHER; note = 2'-fluoro uridine phosphorothioate
  modified_base 15: mod_base = OTHER; note = 2'-O-methyl cytosine phosphorothioate
  modified_base 16: mod_base = OTHER; note = 2'-O-methyl adenosine triethylene glycol
ttgttggggcctgtca

SEQ ID NO: 971 - RNA, 16 nt, synthetic construct
  source 1..16: mol_type = other RNA
  modified_base 1: mod_base = OTHER; note = 2'-O-methyl guanosine phosphorothioate
  modified_base 2: mod_base = OTHER; note = 2'-O-methyl uridine phosphorothioate
  modified_base 3: mod_base = OTHER; note = 2'-O-methyl uridine
  modified_base 4: mod_base = OTHER; note = 2'-fluoro guanosine
  modified_base 5: mod_base = OTHER; note = 2'-O-methyl guanosine
  modified_base 6: mod_base = OTHER; note = 2'-fluoro guanosine
  modified_base 7: mod_base = OTHER; note = 2'-O-methyl guanosine
  modified_base 8: mod_base = OTHER; note = 2'-fluoro cytosine
  modified_base 9: mod_base = OTHER; note = 2'-O-methyl cytosine
  modified_base 10: mod_base = OTHER; note = 2'-fluoro uridine
  modified_base 11: mod_base = OTHER; note = 2'-O-methyl guanosine
  modified_base 12: mod_base = OTHER; note = 2'-O-methyl uridine
  modified_base 13: mod_base = OTHER; note = 2'-O-methyl cytosine
  modified_base 14: mod_base = OTHER; note = 2'-fluoro cytosine phosphorothioate
  modified_base 15: mod_base = OTHER; note = 2'-O-methyl uridine phosphorothioate
  modified_base 16: mod_base = OTHER; note = 2'-O-methyl adenosine triethylene glycol
gttggggcctgtccta

SEQ ID NO: 972 - RNA, 16 nt, synthetic construct
  source 1..16: mol_type = other RNA
  modified_base 1: mod_base = OTHER; note = 2'-O-methyl guanosine phosphorothioate
  modified_base 2: mod_base = OTHER; note = 2'-O-methyl cytosine phosphorothioate
  modified_base 3: mod_base = OTHER; note = 2'-O-methyl cytosine
  modified_base 4: mod_base = OTHER; note = 2'-fluoro uridine
  modified_base 5: mod_base = OTHER; note = 2'-O-methyl guanosine
  modified_base 6: mod_base = OTHER; note = 2'-fluoro uridine
  modified_base 7: mod_base = OTHER; note = 2'-O-methyl cytosine
  modified_base 8: mod_base = OTHER; note = 2'-fluoro cytosine
  modified_base 9: mod_base = OTHER; note = 2'-O-methyl uridine
  modified_base 10: mod_base = OTHER; note = 2'-fluoro guanosine
  modified_base 11: mod_base = OTHER; note = 2'-O-methyl adenosine
  modified_base 12: mod_base = OTHER; note = 2'-O-methyl adenosine
  modified_base 13: mod_base = OTHER; note = 2'-O-methyl uridine
  modified_base 14: mod_base = OTHER; note = 2'-fluoro uridine phosphorothioate
  modified_base 15: mod_base = OTHER; note = 2'-O-methyl cytosine phosphorothioate
  modified_base 16: mod_base = OTHER; note = 2'-O-methyl adenosine triethylene glycol
gcctgtcctgaattca

SEQ ID NO: 973 - RNA, 16 nt, synthetic construct
  source 1..16: mol_type = other RNA
  modified_base 1: mod_base = OTHER; note = 2'-O-methyl cytosine phosphorothioate
  modified_base 2: mod_base = OTHER; note = 2'-O-methyl cytosine phosphorothioate
  modified_base 3: mod_base = OTHER; note = 2'-O-methyl uridine
  modified_base 4: mod_base = OTHER; note = 2'-fluoro guanosine
  modified_base 5: mod_base = OTHER; note = 2'-O-methyl uridine
  modified_base 6: mod_base = OTHER; note = 2'-fluoro cytosine
  modified_base 7: mod_base = OTHER; note = 2'-O-methyl cytosine
  modified_base 8: mod_base = OTHER; note = 2'-fluoro uridine
  modified_base 9: mod_base = OTHER; note = 2'-O-methyl guanosine
  modified_base 10: mod_base = OTHER; note = 2'-fluoro adenosine
  modified_base 11: mod_base = OTHER; note = 2'-O-methyl adenosine
  modified_base 12: mod_base = OTHER; note = 2'-O-methyl uridine
  modified_base 13: mod_base = OTHER; note = 2'-O-methyl uridine
  modified_base 14: mod_base = OTHER; note = 2'-fluoro cytosine phosphorothioate
  modified_base 15: mod_base = OTHER; note = 2'-O-methyl adenosine phosphorothioate
  modified_base 16: mod_base = OTHER; note = 2'-O-methyl adenosine triethylene glycol
cctgtcctgaattcaa

SEQ ID NO: 974 - DNA, 16 bp, synthetic construct
  source 1..16: mol_type = other DNA
  modified_base 1: mod_base = OTHER; note = 2'-O-methyl guanosine phosphorothioate
  modified_base 2: mod_base = OTHER; note = 2'-O-methyl cytosine phosphorothioate
  modified_base 3: mod_base = OTHER; note = 2'-O-methyl guanosine
  modified_base 4: mod_base = OTHER; note = 2'-fluoro guanosine
  modified_base 5: mod_base = OTHER; note = 2'-O-methyl guanosine
  modified_base 6: mod_base = OTHER; note = 2'-fluoro cytosine
  modified_base 7: mod_base = OTHER; note = 2'-O-methyl cytosine
  modified_base 8: mod_base = OTHER; note = 2'-fluoro guanosine
  modified_base 9: mod_base = OTHER; note = 2'-O-methyl guanosine
  modified_base 10: mod_base = OTHER; note = 2'-fluoro cytosine
  modified_base 11: mod_base = OTHER; note = 2'-O-methyl guanosine
  modified_base 12: mod_base = OTHER; note = 2'-O-methyl adenosine
  modified_base 13: mod_base = OTHER; note = 2'-O-methyl cytosine
  modified_base 14: mod_base = OTHER; note = 2'-fluoro adenosine phosphorothioate
  modified_base 15: mod_base = OTHER; note = 2'-O-methyl cytosine phosphorothioate
  modified_base 16: mod_base = OTHER; note = 2'-O-methyl adenosine triethylene glycol
gcgggccggcgacaca

SEQ ID NO: 975 - DNA, 16 bp, synthetic construct
  source 1..16: mol_type = other DNA
  modified_base 1: mod_base = OTHER; note = 2'-O-methyl cytosine phosphorothioate
  modified_base 2: mod_base = OTHER; note = 2'-O-methyl guanosine phosphorothioate
  modified_base 3: mod_base = OTHER; note = 2'-O-methyl guanosine
  modified_base 4: mod_base = OTHER; note = 2'-fluoro guanosine
  modified_base 5: mod_base = OTHER; note = 2'-O-methyl cytosine
  modified_base 6: mod_base = OTHER; note = 2'-fluoro cytosine
  modified_base 7: mod_base = OTHER; note = 2'-O-methyl guanosine
  modified_base 8: mod_base = OTHER; note = 2'-fluoro guanosine
  modified_base 9: mod_base = OTHER; note = 2'-O-methyl cytosine
  modified_base 10: mod_base = OTHER; note = 2'-fluoro guanosine
  modified_base 11: mod_base = OTHER; note = 2'-O-methyl adenosine
  modified_base 12: mod_base = OTHER; note = 2'-O-methyl cytosine
  modified_base 13: mod_base = OTHER; note = 2'-O-methyl adenosine
  modified_base 14: mod_base = OTHER; note = 2'-fluoro cytosine phosphorothioate
  modified_base 15: mod_base = OTHER; note = 2'-O-methyl guanosine phosphorothioate
  modified_base 16: mod_base = OTHER; note = 2'-O-methyl adenosine triethylene glycol
cgggccggcgacacga

SEQ ID NO: 976 - DNA, 16 bp, synthetic construct
  source 1..16: mol_type = other DNA
  modified_base 1: mod_base = OTHER; note = 2'-O-methyl guanosine phosphorothioate
  modified_base 2: mod_base = OTHER; note = 2'-O-methyl guanosine phosphorothioate
  modified_base 3: mod_base = OTHER; note = 2'-O-methyl guanosine
  modified_base 4: mod_base = OTHER; note = 2'-fluoro cytosine
  modified_base 5: mod_base = OTHER; note = 2'-O-methyl cytosine
  modified_base 6: mod_base = OTHER; note = 2'-fluoro guanosine
  modified_base 7: mod_base = OTHER; note = 2'-O-methyl guanosine
  modified_base 8: mod_base = OTHER; note = 2'-fluoro cytosine
  modified_base 9: mod_base = OTHER; note = 2'-O-methyl guanosine
  modified_base 10: mod_base = OTHER; note = 2'-fluoro adenosine
  modified_base 11: mod_base = OTHER; note = 2'-O-methyl cytosine
  modified_base 12: mod_base = OTHER; note = 2'-O-methyl adenosine
  modified_base 13: mod_base = OTHER; note = 2'-O-methyl cytosine
  modified_base 14: mod_base = OTHER; note = 2'-fluoro guanosine phosphorothioate
  modified_base 15: mod_base = OTHER; note = 2'-O-methyl adenosine phosphorothioate
  modified_base 16: mod_base = OTHER; note = 2'-O-methyl adenosine triethylene glycol
gggccggcgacacgaa

SEQ ID NO: 977 - DNA, 16 bp, synthetic construct
  source 1..16: mol_type = other DNA
  modified_base 1: mod_base = OTHER; note = 2'-O-methyl guanosine phosphorothioate
  modified_base 2: mod_base = OTHER; note = 2'-O-methyl guanosine phosphorothioate
  modified_base 3: mod_base = OTHER; note = 2'-O-methyl cytosine
  modified_base 4: mod_base = OTHER; note = 2'-fluoro cytosine
  modified_base 5: mod_base = OTHER; note = 2'-O-methyl guanosine
  modified_base 6: mod_base = OTHER; note = 2'-fluoro guanosine
  modified_base 7: mod_base = OTHER; note = 2'-O-methyl cytosine
  modified_base 8: mod_base = OTHER; note = 2'-fluoro guanosine
  modified_base 9: mod_base = OTHER; note = 2'-O-methyl adenosine
  modified_base 10: mod_base = OTHER; note = 2'-fluoro cytosine
  modified_base 11: mod_base = OTHER; note = 2'-O-methyl adenosine
  modified_base 12: mod_base = OTHER; note = 2'-O-methyl cytosine
  modified_base 13: mod_base = OTHER; note = 2'-O-methyl guanosine
  modified_base 14: mod_base = OTHER; note = 2'-fluoro adenosine phosphorothioate
  modified_base 15: mod_base = OTHER; note = 2'-O-methyl adenosine phosphorothioate
  modified_base 16: mod_base = OTHER; note = 2'-O-methyl adenosine triethylene glycol
ggccggcgacacgaaa

SEQ ID NO: 978 - DNA, 16 bp, synthetic construct
  source 1..16: mol_type = other DNA
  modified_base 1: mod_base = OTHER; note = 2'-O-methyl guanosine phosphorothioate
  modified_base 2: mod_base = OTHER; note = 2'-O-methyl cytosine phosphorothioate
  modified_base 3: mod_base = OTHER; note = 2'-O-methyl cytosine
  modified_base 4: mod_base = OTHER; note = 2'-fluoro guanosine
  modified_base 5: mod_base = OTHER; note = 2'-O-methyl guanosine
  modified_base 6: mod_base = OTHER; note = 2'-fluoro cytosine
  modified_base 7: mod_base = OTHER; note = 2'-O-methyl guanosine
  modified_base 8: mod_base = OTHER; note = 2'-fluoro adenosine
  modified_base 9: mod_base = OTHER; note = 2'-O-methyl cytosine
  modified_base 10: mod_base = OTHER; note = 2'-fluoro adenosine
  modified_base 11: mod_base = OTHER; note = 2'-O-methyl cytosine
  modified_base 12: mod_base = OTHER; note = 2'-O-methyl guanosine
  modified_base 13: mod_base = OTHER; note = 2'-O-methyl adenosine
  modified_base 14: mod_base = OTHER; note = 2'-fluoro adenosine phosphorothioate
  modified_base 15: mod_base = OTHER; note = 2'-O-methyl cytosine phosphorothioate
  modified_base 16: mod_base = OTHER; note = 2'-O-methyl adenosine triethylene glycol
gccggcgacacgaaca

SEQ ID NO: 979 - DNA, 16 bp, synthetic construct
  source 1..16: mol_type = other DNA
  modified_base 1: mod_base = OTHER; note = 2'-O-methyl cytosine phosphorothioate
  modified_base 2: mod_base = OTHER; note = 2'-O-methyl guanosine phosphorothioate
  modified_base 3: mod_base = OTHER; note = 2'-O-methyl guanosine
  modified_base 4: mod_base = OTHER; note = 2'-fluoro cytosine
  modified_base 5: mod_base = OTHER; note = 2'-O-methyl guanosine
  modified_base 6: mod_base = OTHER; note = 2'-fluoro adenosine
  modified_base 7: mod_base = OTHER; note = 2'-O-methyl cytosine
  modified_base 8: mod_base = OTHER; note = 2'-fluoro adenosine
  modified_base 9: mod_base = OTHER; note = 2'-O-methyl cytosine
  modified_base 10: mod_base = OTHER; note = 2'-fluoro guanosine
  modified_base 11: mod_base = OTHER; note = 2'-O-methyl adenosine
  modified_base 12: mod_base = OTHER; note = 2'-O-methyl adenosine
  modified_base 13: mod_base = OTHER; note = 2'-O-methyl cytosine
  modified_base 14: mod_base = OTHER; note = 2'-fluoro cytosine phosphorothioate
  modified_base 15: mod_base = OTHER; note = 2'-O-methyl cytosine phosphorothioate
  modified_base 16: mod_base = OTHER; note = 2'-O-methyl adenosine triethylene glycol
cggcgacacgaaccca

SEQ ID NO: 980 - DNA, 16 bp, synthetic construct
  source 1..16: mol_type = other DNA
  modified_base 1: mod_base = OTHER; note = 2'-O-methyl guanosine phosphorothioate
  modified_base 2: mod_base = OTHER; note = 2'-O-methyl guanosine phosphorothioate
  modified_base 3: mod_base = OTHER; note = 2'-O-methyl cytosine
  modified_base 4: mod_base = OTHER; note = 2'-fluoro guanosine
  modified_base 5: mod_base = OTHER; note = 2'-O-methyl adenosine
  modified_base 6: mod_base = OTHER; note = 2'-fluoro cytosine
  modified_base 7: mod_base = OTHER; note = 2'-O-methyl adenosine
  modified_base 8: mod_base = OTHER; note = 2'-fluoro cytosine
  modified_base 9: mod_base = OTHER; note = 2'-O-methyl guanosine
  modified_base 10: mod_base = OTHER; note = 2'-fluoro adenosine
  modified_base 11: mod_base = OTHER; note = 2'-O-methyl adenosine
  modified_base 12: mod_base = OTHER; note = 2'-O-methyl cytosine
  modified_base 13: mod_base = OTHER; note = 2'-O-methyl cytosine
  modified_base 14: mod_base = OTHER; note = 2'-fluoro cytosine phosphorothioate
  modified_base 15: mod_base = OTHER; note = 2'-O-methyl cytosine phosphorothioate
  modified_base 16: mod_base = OTHER; note = 2'-O-methyl adenosine triethylene glycol
ggcgacacgaacccca

SEQ ID NO: 981 - DNA, 16 bp, synthetic construct
  source 1..16: mol_type = other DNA
  modified_base 1: mod_base = OTHER; note = 2'-O-methyl cytosine phosphorothioate
  modified_base 2: mod_base = OTHER; note = 2'-O-methyl cytosine phosphorothioate
  modified_base 3: mod_base = OTHER; note = 2'-O-methyl cytosine
  modified_base 4: mod_base = OTHER; note = 2'-fluoro guanosine
  modified_base 5: mod_base = OTHER; note = 2'-O-methyl guanosine
  modified_base 6: mod_base = OTHER; note = 2'-fluoro cytosine
  modified_base 7: mod_base = OTHER; note = 2'-O-methyl cytosine
  modified_base 8: mod_base = OTHER; note = 2'-fluoro cytosine
  modified_base 9: mod_base = OTHER; note = 2'-O-methyl cytosine
  modified_base 10: mod_base = OTHER; note = 2'-fluoro guanosine
  modified_base 11: mod_base = OTHER; note = 2'-O-methyl cytosine
  modified_base 12: mod_base = OTHER; note = 2'-O-methyl adenosine
  modified_base 13: mod_base = OTHER; note = 2'-O-methyl guanosine
  modified_base 14: mod_base = OTHER; note = 2'-fluoro adenosine phosphorothioate
  modified_base 15: mod_base = OTHER; note = 2'-O-methyl guanosine phosphorothioate
  modified_base 16: mod_base = OTHER; note = 2'-O-methyl adenosine triethylene glycol
cccggccccgcagaga

SEQ ID NO: 982 - DNA, 16 bp, synthetic construct
  source 1..16: mol_type = other DNA
  modified_base 1: mod_base = OTHER; note = 2'-O-methyl cytosine phosphorothioate
  modified_base 2: mod_base = OTHER; note = 2'-O-methyl cytosine phosphorothioate
  modified_base 3: mod_base = OTHER; note = 2'-O-methyl guanosine
  modified_base 4: mod_base = OTHER; note = 2'-fluoro guanosine
  modified_base 5: mod_base = OTHER; note = 2'-O-methyl cytosine
  modified_base 6: mod_base = OTHER; note = 2'-fluoro cytosine
  modified_base 7: mod_base = OTHER; note = 2'-O-methyl cytosine
  modified_base 8: mod_base = OTHER; note = 2'-fluoro cytosine
  modified_base 9: mod_base = OTHER; note = 2'-O-methyl guanosine
  modified_base 10: mod_base = OTHER; note = 2'-fluoro cytosine
  modified_base 11: mod_base = OTHER; note = 2'-O-methyl adenosine
  modified_base 12: mod_base = OTHER; note = 2'-O-methyl guanosine
  modified_base 13: mod_base = OTHER; note = 2'-O-methyl adenosine
  modified_base 14: mod_base = OTHER; note = 2'-fluoro guanosine phosphorothioate
  modified_base 15: mod_base = OTHER; note = 2'-O-methyl adenosine phosphorothioate
  modified_base 16: mod_base = OTHER; note = 2'-O-methyl adenosine triethylene glycol
ccggccccgcagagaa

SEQ ID NO: 983 - DNA, 16 bp, synthetic construct
  source 1..16: mol_type = other DNA
  modified_base 1: mod_base = OTHER; note = 2'-O-methyl cytosine phosphorothioate
  modified_base 2: mod_base = OTHER; note = 2'-O-methyl guanosine phosphorothioate
  modified_base 3: mod_base = OTHER; note = 2'-O-methyl guanosine
  modified_base 4: mod_base = OTHER; note = 2'-fluoro cytosine
  modified_base 5: mod_base = OTHER; note = 2'-O-methyl cytosine
  modified_base 6: mod_base = OTHER; note = 2'-fluoro cytosine
  modified_base 7: mod_base = OTHER; note = 2'-O-methyl cytosine
  modified_base 8: mod_base = OTHER; note = 2'-fluoro guanosine
  modified_base 9: mod_base = OTHER; note = 2'-O-methyl cytosine
  modified_base 10: mod_base = OTHER; note = 2'-fluoro adenosine
  modified_base 11: mod_base = OTHER; note = 2'-O-methyl guanosine
  modified_base 12: mod_base = OTHER; note = 2'-O-methyl adenosine
  modified_base 13: mod_base = OTHER; note = 2'-O-methyl guanosine
  modified_base 14: mod_base = OTHER; note = 2'-fluoro adenosine phosphorothioate
  modified_base 15: mod_base = OTHER; note = 2'-O-methyl cytosine phosphorothioate
  modified_base 16: mod_base = OTHER; note = 2'-O-methyl adenosine triethylene glycol
cggccccgcagagaca

SEQ ID NO: 984 - DNA, 16 bp, synthetic construct
  source 1..16: mol_type = other DNA
  modified_base 1: mod_base = OTHER; note = 2'-O-methyl cytosine phosphorothioate
  modified_base 2: mod_base = OTHER; note = 2'-O-methyl cytosine phosphorothioate
  modified_base 3: mod_base = OTHER; note = 2'-O-methyl cytosine
  modified_base 4: mod_base = OTHER; note = 2'-fluoro cytosine
  modified_base 5: mod_base = OTHER; note = 2'-O-methyl guanosine
  modified_base 6: mod_base = OTHER; note = 2'-fluoro cytosine
  modified_base 7: mod_base = OTHER; note = 2'-O-methyl adenosine
  modified_base 8: mod_base = OTHER; note = 2'-fluoro guanosine
  modified_base 9: mod_base = OTHER; note = 2'-O-methyl adenosine
  modified_base 10: mod_base = OTHER; note = 2'-fluoro guanosine
  modified_base 11: mod_base = OTHER; note = 2'-O-methyl adenosine
  modified_base 12: mod_base = OTHER; note = 2'-O-methyl cytosine
  modified_base 13: mod_base = OTHER; note = 2'-O-methyl adenosine
  modified_base 14: mod_base = OTHER; note = 2'-fluoro guanosine phosphorothioate
  modified_base 15: mod_base = OTHER; note = 2'-O-methyl adenosine phosphorothioate
  modified_base 16: mod_base = OTHER; note = 2'-O-methyl adenosine triethylene glycol
ccccgcagagacagaa

SEQ ID NO: 985 - RNA, 16 nt, synthetic construct
  source 1..16: mol_type = other RNA
  modified_base 1: mod_base = OTHER; note = 2'-O-methyl cytosine phosphorothioate
  modified_base 2: mod_base = OTHER; note = 2'-O-methyl cytosine phosphorothioate
  modified_base 3: mod_base = OTHER; note = 2'-O-methyl guanosine
  modified_base 4: mod_base = OTHER; note = 2'-fluoro cytosine
  modified_base 5: mod_base = OTHER; note = 2'-O-methyl adenosine
  modified_base 6: mod_base = OTHER; note = 2'-fluoro guanosine
  modified_base 7: mod_base = OTHER; note = 2'-O-methyl adenosine
  modified_base 8: mod_base = OTHER; note = 2'-fluoro guanosine
  modified_base 9: mod_base = OTHER; note = 2'-O-methyl adenosine
  modified_base 10: mod_base = OTHER; note = 2'-fluoro cytosine
  modified_base 11: mod_base = OTHER; note = 2'-O-methyl adenosine
  modified_base 12: mod_base = OTHER; note = 2'-O-methyl guanosine
  modified_base 13: mod_base = OTHER; note = 2'-O-methyl adenosine
  modified_base 14: mod_base = OTHER; note = 2'-fluoro guanosine phosphorothioate
  modified_base 15: mod_base = OTHER; note = 2'-O-methyl uridine phosphorothioate
  modified_base 16: mod_base = OTHER; note = 2'-O-methyl adenosine triethylene glycol
ccgcagagacagagta

SEQ ID NO: 986 - RNA, 16 nt, synthetic construct
  source 1..16: mol_type = other RNA
  modified_base 1: mod_base = OTHER; note = 2'-O-methyl adenosine phosphorothioate
  modified_base 2: mod_base = OTHER; note = 2'-O-methyl guanosine phosphorothioate
  modified_base 3: mod_base = OTHER; note = 2'-O-methyl adenosine
  modified_base 4: mod_base = OTHER; note = 2'-fluoro cytosine
  modified_base 5: mod_base = OTHER; note = 2'-O-methyl adenosine
  modified_base 6: mod_base = OTHER; note = 2'-fluoro guanosine
  modified_base 7: mod_base = OTHER; note = 2'-O-methyl adenosine
  modified_base 8: mod_base = OTHER; note = 2'-fluoro guanosine
  modified_base 9: mod_base = OTHER; note = 2'-O-methyl uridine
  modified_base 10: mod_base = OTHER; note = 2'-fluoro guanosine
  modified_base 11: mod_base = OTHER; note = 2'-O-methyl adenosine
  modified_base 12: mod_base = OTHER; note = 2'-O-methyl cytosine
  modified_base 13: mod_base = OTHER; note = 2'-O-methyl cytosine
  modified_base 14: mod_base = OTHER; note = 2'-fluoro cytosine phosphorothioate
  modified_base 15: mod_base = OTHER; note = 2'-O-methyl adenosine phosphorothioate
  modified_base 16: mod_base = OTHER; note = 2'-O-methyl adenosine triethylene glycol
agacagagtgacccaa

SEQ ID NO: 987 - RNA, 16 nt, synthetic construct
  source 1..16: mol_type = other RNA
  modified_base 1: mod_base = OTHER; note = 2'-O-methyl guanosine phosphorothioate
  modified_base 2: mod_base = OTHER; note = 2'-O-methyl adenosine phosphorothioate
  modified_base 3: mod_base = OTHER; note = 2'-O-methyl cytosine
  modified_base 4: mod_base = OTHER; note = 2'-fluoro adenosine
  modified_base 5: mod_base = OTHER; note = 2'-O-methyl guanosine
  modified_base 6: mod_base = OTHER; note = 2'-fluoro adenosine
  modified_base 7: mod_base = OTHER; note = 2'-O-methyl guanosine
  modified_base 8: mod_base = OTHER; note = 2'-fluoro uridine
  modified_base 9: mod_base = OTHER; note = 2'-O-methyl guanosine
  modified_base 10: mod_base = OTHER; note = 2'-fluoro adenosine
  modified_base 11: mod_base = OTHER; note = 2'-O-methyl cytosine
  modified_base 12: mod_base = OTHER; note = 2'-O-methyl cytosine
  modified_base 13: mod_base = OTHER; note = 2'-O-methyl cytosine
  modified_base 14: mod_base = OTHER; note = 2'-fluoro adenosine phosphorothioate
  modified_base 15: mod_base = OTHER; note = 2'-O-methyl guanosine phosphorothioate
  modified_base 16: mod_base = OTHER; note = 2'-O-methyl adenosine triethylene glycol
gacagagtgacccaga

SEQ ID NO: 988 - RNA, 16 nt, synthetic construct
  source 1..16: mol_type = other RNA
  modified_base 1: mod_base = OTHER; note = 2'-O-methyl adenosine phosphorothioate
  modified_base 2: mod_base = OTHER; note = 2'-O-methyl cytosine phosphorothioate
  modified_base 3: mod_base = OTHER; note = 2'-O-methyl adenosine
  modified_base 4: mod_base = OTHER; note = 2'-fluoro guanosine
  modified_base 5: mod_base = OTHER; note = 2'-O-methyl adenosine
  modified_base 6: mod_base = OTHER; note = 2'-fluoro guanosine
  modified_base 7: mod_base = OTHER; note = 2'-O-methyl uridine
  modified_base 8: mod_base = OTHER; note = 2'-fluoro guanosine
  modified_base 9: mod_base = OTHER; note = 2'-O-methyl adenosine
  modified_base 10: mod_base = OTHER; note = 2'-fluoro cytosine
  modified_base 11: mod_base = OTHER; note = 2'-O-methyl cytosine
  modified_base 12: mod_base = OTHER; note = 2'-O-methyl cytosine
  modified_base 13: mod_base = OTHER; note = 2'-O-methyl adenosine
  modified_base 14: mod_base = OTHER; note = 2'-fluoro guanosine phosphorothioate
  modified_base 15: mod_base = OTHER; note = 2'-O-methyl cytosine phosphorothioate
  modified_base 16: mod_base = OTHER; note = 2'-O-methyl adenosine triethylene glycol
acagagtgacccagca

SEQ ID NO: 989 - RNA, 16 nt, synthetic construct
  source 1..16: mol_type = other RNA
  modified_base 1: mod_base = OTHER; note = 2'-O-methyl guanosine phosphorothioate
  modified_base 2: mod_base = OTHER; note = 2'-O-methyl adenosine phosphorothioate
  modified_base 3: mod_base = OTHER; note = 2'-O-methyl guanosine
  modified_base 4: mod_base = OTHER; note = 2'-fluoro uridine
  modified_base 5: mod_base = OTHER; note = 2'-O-methyl guanosine
  modified_base 6: mod_base = OTHER; note = 2'-fluoro adenosine
  modified_base 7: mod_base = OTHER; note = 2'-O-methyl cytosine
  modified_base 8: mod_base = OTHER; note = 2'-fluoro cytosine
  modified_base 9: mod_base = OTHER; note = 2'-O-methyl cytosine
  modified_base 10: mod_base = OTHER; note = 2'-fluoro adenosine
  modified_base 11: mod_base = OTHER; note = 2'-O-methyl guanosine
  modified_base 12: mod_base = OTHER; note = 2'-O-methyl cytosine
  modified_base 13: mod_base = OTHER; note = 2'-O-methyl adenosine
  modified_base 14: mod_base = OTHER; note = 2'-fluoro adenosine phosphorothioate
  modified_base 15: mod_base = OTHER; note = 2'-O-methyl cytosine phosphorothioate
  modified_base 16: mod_base = OTHER; note = 2'-O-methyl adenosine triethylene glycol
gagtgacccagcaaca

SEQ ID NO: 990 - RNA, 16 nt, synthetic construct
  source 1..16: mol_type = other RNA
  modified_base 1: mod_base = OTHER; note = 2'-O-methyl adenosine phosphorothioate
  modified_base 2: mod_base = OTHER; note = 2'-O-methyl guanosine phosphorothioate
  modified_base 3: mod_base = OTHER; note = 2'-O-methyl uridine
  modified_base 4: mod_base = OTHER; note = 2'-fluoro guanosine
  modified_base 5: mod_base = OTHER; note = 2'-O-methyl adenosine
  modified_base 6: mod_base = OTHER; note = 2'-fluoro cytosine
  modified_base 7: mod_base = OTHER; note = 2'-O-methyl cytosine
  modified_base 8: mod_base = OTHER; note = 2'-fluoro cytosine
  modified_base 9: mod_base = OTHER; note = 2'-O-methyl adenosine
  modified_base 10: mod_base = OTHER; note = 2'-fluoro guanosine
  modified_base 11: mod_base = OTHER; note = 2'-O-methyl cytosine
  modified_base 12: mod_base = OTHER; note = 2'-O-methyl adenosine
  modified_base 13: mod_base = OTHER; note = 2'-O-methyl adenosine
  modified_base 14: mod_base = OTHER; note = 2'-fluoro cytosine phosphorothioate
  modified_base 15: mod_base = OTHER; note = 2'-O-methyl cytosine phosphorothioate
  modified_base 16: mod_base = OTHER; note = 2'-O-methyl adenosine triethylene glycol
agtgacccagcaacca

SEQ ID NO: 991 - RNA, 16 nt, synthetic construct
  source 1..16: mol_type = other RNA
  modified_base 1: mod_base = OTHER; note = 2'-O-methyl guanosine phosphorothioate
  modified_base 2: mod_base = OTHER; note = 2'-O-methyl uridine phosphorothioate
  modified_base 3: mod_base = OTHER; note = 2'-O-methyl guanosine
  modified_base 4: mod_base = OTHER; note = 2'-fluoro adenosine
  modified_base 5: mod_base = OTHER; note = 2'-O-methyl cytosine
  modified_base 6: mod_base = OTHER; note = 2'-fluoro cytosine
  modified_base 7: mod_base = OTHER; note = 2'-O-methyl cytosine
  modified_base 8: mod_base = OTHER; note = 2'-fluoro adenosine
  modified_base 9: mod_base = OTHER; note = 2'-O-methyl guanosine
  modified_base 10: mod_base = OTHER; note = 2'-fluoro cytosine
  modified_base 11: mod_base = OTHER; note = 2'-O-methyl adenosine
  modified_base 12: mod_base = OTHER; note = 2'-O-methyl adenosine
  modified_base 13: mod_base = OTHER; note = 2'-O-methyl cytosine
  modified_base 14: mod_base = OTHER; note = 2'-fluoro cytosine phosphorothioate
  modified_base 15: mod_base = OTHER; note = 2'-O-methyl cytosine phosphorothioate
  modified_base 16: mod_base = OTHER; note = 2'-O-methyl adenosine triethylene glycol
gtgacccagcaaccca

SEQ ID NO: 992 - DNA, 16 bp, synthetic construct
  source 1..16: mol_type = other DNA
  modified_base 1: mod_base = OTHER; note = 2'-O-methyl adenosine phosphorothioate
  modified_base 2: mod_base = OTHER; note = 2'-O-methyl cytosine phosphorothioate
  modified_base 3: mod_base = OTHER; note = 2'-O-methyl cytosine
  modified_base 4: mod_base = OTHER; note = 2'-fluoro cytosine
  modified_base 5: mod_base = OTHER; note = 2'-O-methyl adenosine
  modified_base 6: mod_base = OTHER; note = 2'-fluoro guanosine
  modified_base 7: mod_base = OTHER; note = 2'-O-methyl cytosine
  modified_base 8: mod_base = OTHER; note = 2'-fluoro adenosine
  modified_base 9: mod_base = OTHER; note = 2'-O-methyl adenosine
  modified_base 10: mod_base = OTHER; note = 2'-fluoro cytosine
  modified_base 11: mod_base = OTHER; note = 2'-O-methyl cytosine
  modified_base 12: mod_base = OTHER; note = 2'-O-methyl cytosine
  modified_base 13: mod_base = OTHER; note = 2'-O-methyl adenosine
  modified_base 14: mod_base = OTHER; note = 2'-fluoro guanosine phosphorothioate
  modified_base 15: mod_base = OTHER; note = 2'-O-methyl adenosine phosphorothioate
  modified_base 16: mod_base = OTHER; note = 2'-O-methyl adenosine triethylene glycol
acccagcaacccagaa

SEQ ID NO: 993 - RNA, 16 nt, synthetic construct
  source 1..16: mol_type = other RNA
  modified_base 1: mod_base = OTHER; note = 2'-O-methyl adenosine phosphorothioate
  modified_base 2: mod_base = OTHER; note = 2'-O-methyl cytosine phosphorothioate
  modified_base 3: mod_base = OTHER; note = 2'-O-methyl cytosine
  modified_base 4: mod_base = OTHER; note = 2'-fluoro cytosine
  modified_base 5: mod_base = OTHER; note = 2'-O-methyl adenosine
  modified_base 6: mod_base = OTHER; note = 2'-fluoro guanosine
  modified_base 7: mod_base = OTHER; note = 2'-O-methyl adenosine
  modified_base 8: mod_base = OTHER; note = 2'-fluoro guanosine
  modified_base 9: mod_base = OTHER; note = 2'-O-methyl cytosine
  modified_base 10: mod_base = OTHER; note = 2'-fluoro cytosine
  modified_base 11: mod_base = OTHER; note = 2'-O-methyl cytosine
  modified_base 12: mod_base = OTHER; note = 2'-O-methyl adenosine
  modified_base 13: mod_base = OTHER; note = 2'-O-methyl uridine
  modified_base 14: mod_base = OTHER; note = 2'-fluoro guanosine phosphorothioate
  modified_base 15: mod_base = OTHER; note = 2'-O-methyl adenosine phosphorothioate
  modified_base 16: mod_base = OTHER; note = 2'-O-methyl adenosine triethylene glycol
acccagagcccatgaa

SEQ ID NO: 994 - RNA, 16 nt, synthetic construct
  source 1..16: mol_type = other RNA
  modified_base 1: mod_base = OTHER; note = 2'-O-methyl cytosine phosphorothioate
  modified_base 2: mod_base = OTHER; note = 2'-O-methyl cytosine phosphorothioate
  modified_base 3: mod_base = OTHER; note = 2'-O-methyl cytosine
  modified_base 4: mod_base = OTHER; note = 2'-fluoro adenosine
  modified_base 5: mod_base = OTHER; note = 2'-O-methyl guanosine
  modified_base 6: mod_base = OTHER; note = 2'-fluoro adenosine
  modified_base 7: mod_base = OTHER; note = 2'-O-methyl guanosine
  modified_base 8: mod_base = OTHER; note = 2'-fluoro cytosine
  modified_base 9: mod_base = OTHER; note = 2'-O-methyl cytosine
  modified_base 10: mod_base = OTHER; note = 2'-fluoro cytosine
  modified_base 11: mod_base = OTHER; note = 2'-O-methyl adenosine
  modified_base 12: mod_base = OTHER; note = 2'-O-methyl uridine
  modified_base 13: mod_base = OTHER; note = 2'-O-methyl guanosine
  modified_base 14: mod_base = OTHER; note = 2'-fluoro adenosine phosphorothioate
  modified_base 15: mod_base = OTHER; note = 2'-O-methyl guanosine phosphorothioate
  modified_base 16: mod_base = OTHER; note = 2'-O-methyl adenosine triethylene glycol
cccagagcccatgaga

SEQ ID NO: 995 - RNA, 16 nt, synthetic construct
  source 1..16: mol_type = other RNA
  modified_base 1: mod_base = OTHER; note = 2'-O-methyl cytosine phosphorothioate
  modified_base 2: mod_base = OTHER; note = 2'-O-methyl adenosine phosphorothioate
  modified_base 3: mod_base = OTHER; note = 2'-O-methyl guanosine
  modified_base 4: mod_base = OTHER; note = 2'-fluoro adenosine
  modified_base 5: mod_base = OTHER; note = 2'-O-methyl guanosine
  modified_base 6: mod_base = OTHER; note = 2'-fluoro cytosine
  modified_base 7: mod_base = OTHER; note = 2'-O-methyl cytosine
  modified_base 8: mod_base = OTHER; note = 2'-fluoro cytosine
  modified_base 9: mod_base = OTHER; note = 2'-O-methyl adenosine
  modified_base 10: mod_base = OTHER; note = 2'-fluoro uridine
  modified_base 11: mod_base = OTHER; note = 2'-O-methyl guanosine
  modified_base 12: mod_base = OTHER; note = 2'-O-methyl adenosine
  modified_base 13: mod_base = OTHER; note = 2'-O-methyl guanosine
  modified_base 14: mod_base = OTHER; note = 2'-fluoro guanosine phosphorothioate
  modified_base 15: mod_base = OTHER; note = 2'-O-methyl guanosine phosphorothioate
  modified_base 16: mod_base = OTHER; note = 2'-O-methyl adenosine triethylene glycol
cagagcccatgaggga

SEQ ID NO: 996 - RNA, 16 nt, synthetic construct
  source 1..16: mol_type = other RNA
  modified_base 1: mod_base = OTHER; note = 2'-O-methyl adenosine phosphorothioate
  modified_base 2: mod_base = OTHER; note = 2'-O-methyl guanosine phosphorothioate
  modified_base 3: mod_base = OTHER; note = 2'-O-methyl adenosine
  modified_base 4: mod_base = OTHER; note = 2'-fluoro guanosine
  modified_base 5: mod_base = OTHER; note = 2'-O-methyl cytosine
  modified_base 6: mod_base = OTHER; note = 2'-fluoro cytosine
  modified_base 7: mod_base = OTHER; note = 2'-O-methyl cytosine
  modified_base 8: mod_base = OTHER; note = 2'-fluoro adenosine
  modified_base 9: mod_base = OTHER; note = 2'-O-methyl uridine
  modified_base 10: mod_base = OTHER; note = 2'-fluoro guanosine
  modified_base 11: mod_base = OTHER; note = 2'-O-methyl adenosine
  modified_base 12: mod_base = OTHER; note = 2'-O-methyl guanosine
  modified_base 13: mod_base = OTHER; note = 2'-O-methyl guanosine
  modified_base 14: mod_base = OTHER; note = 2'-fluoro guanosine phosphorothioate
  modified_base 15: mod_base = OTHER; note = 2'-O-methyl adenosine phosphorothioate
  modified_base 16: mod_base = OTHER; note = 2'-O-methyl adenosine triethylene glycol
agagcccatgagggaa

SEQ ID NO: 997 - RNA, 16 nt, synthetic construct
  source 1..16: mol_type = other RNA
  modified_base 1: mod_base = OTHER; note = 2'-O-methyl guanosine phosphorothioate
  modified_base 2: mod_base = OTHER; note = 2'-O-methyl adenosine phosphorothioate
  modified_base 3: mod_base = OTHER; note = 2'-O-methyl guanosine
  modified_base 4: mod_base = OTHER; note = 2'-fluoro cytosine
  modified_base 5: mod_base = OTHER; note = 2'-O-methyl cytosine
  modified_base 6: mod_base = OTHER; note = 2'-fluoro cytosine
  modified_base 7: mod_base = OTHER; note = 2'-O-methyl adenosine
  modified_base 8: mod_base = OTHER; note = 2'-fluoro uridine
  modified_base 9: mod_base = OTHER; note = 2'-O-methyl guanosine
  modified_base 10: mod_base = OTHER; note = 2'-fluoro adenosine
  modified_base 11: mod_base = OTHER; note = 2'-O-methyl guanosine
  modified_base 12: mod_base = OTHER; note = 2'-O-methyl guanosine
  modified_base 13: mod_base = OTHER; note = 2'-O-methyl guanosine
  modified_base 14: mod_base = OTHER; note = 2'-fluoro adenosine phosphorothioate
  modified_base 15: mod_base = OTHER; note = 2'-O-methyl cytosine phosphorothioate
  modified_base 16: mod_base = OTHER; note = 2'-O-methyl adenosine triethylene glycol
gagcccatgagggaca

SEQ ID NO: 998 - RNA, 16 nt, synthetic construct
  source 1..16: mol_type = other RNA
  modified_base 1: mod_base = OTHER; note = 2'-O-methyl uridine phosphorothioate
  modified_base 2: mod_base = OTHER; note = 2'-O-methyl uridine phosphorothioate
  modified_base 3: mod_base = OTHER; note = 2'-O-methyl cytosine
  modified_base 4: mod_base = OTHER; note = 2'-fluoro cytosine
  modified_base 5: mod_base = OTHER; note = 2'-O-methyl guanosine
  modified_base 6: mod_base = OTHER; note = 2'-fluoro adenosine
  modified_base 7: mod_base = OTHER; note = 2'-O-methyl uridine
  modified_base 8: mod_base = OTHER; note = 2'-fluoro cytosine
  modified_base 9: mod_base = OTHER; note = 2'-O-methyl uridine
  modified_base 10: mod_base = OTHER; note = 2'-fluoro guanosine
  modified_base 11: mod_base = OTHER; note = 2'-O-methyl guanosine
  modified_base 12: mod_base = OTHER; note = 2'-O-methyl adenosine
  modified_base 13: mod_base = OTHER; note = 2'-O-methyl uridine
  modified_base 14: mod_base = OTHER; note = 2'-fluoro guanosine phosphorothioate
  modified_base 15: mod_base = OTHER; note = 2'-O-methyl uridine phosphorothioate
  modified_base 16: mod_base = OTHER; note = 2'-O-methyl adenosine triethylene glycol
ttccgatctggatgta

SEQ ID NO: 999 - RNA, 16 nt, synthetic construct
  source 1..16: mol_type = other RNA
  modified_base 1: mod_base = OTHER; note = 2'-O-methyl uridine phosphorothioate
  modified_base 2: mod_base = OTHER; note = 2'-O-methyl cytosine phosphorothioate
  modified_base 3: mod_base = OTHER; note = 2'-O-methyl cytosine
  modified_base 4: mod_base = OTHER; note = 2'-fluoro guanosine
  modified_base 5: mod_base = OTHER; note = 2'-O-methyl adenosine
  modified_base 6: mod_base = OTHER; note = 2'-fluoro uridine
  modified_base 7: mod_base = OTHER; note = 2'-O-methyl cytosine
  modified_base 8: mod_base = OTHER; note = 2'-fluoro uridine
  modified_base 9: mod_base = OTHER; note = 2'-O-methyl guanosine
  modified_base 10: mod_base = OTHER; note = 2'-fluoro guanosine
  modified_base 11: mod_base = OTHER; note = 2'-O-methyl adenosine
  modified_base 12: mod_base = OTHER; note = 2'-O-methyl uridine
  modified_base 13: mod_base = OTHER; note = 2'-O-methyl guanosine
  modified_base 14: mod_base = OTHER; note = 2'-fluoro uridine phosphorothioate
  modified_base 15: mod_base = OTHER; note = 2'-O-methyl guanosine phosphorothioate
  modified_base 16: mod_base = OTHER; note = 2'-O-methyl adenosine triethylene glycol
tccgatctggatgtga

SEQ ID NO: 1000 - RNA, 16 nt, synthetic construct
  source 1..16: mol_type = other RNA
  modified_base 1: mod_base = OTHER; note = 2'-O-methyl cytosine phosphorothioate
  modified_base 2: mod_base = OTHER; note = 2'-O-methyl cytosine phosphorothioate
  modified_base 3: mod_base = OTHER; note = 2'-O-methyl guanosine
  modified_base 4: mod_base = OTHER; note = 2'-fluoro adenosine
  modified_base 5: mod_base = OTHER; note = 2'-O-methyl uridine
  modified_base 6: mod_base = OTHER; note = 2'-fluoro cytosine
  modified_base 7: mod_base = OTHER; note = 2'-O-methyl uridine
  modified_base 8: mod_base = OTHER; note = 2'-fluoro guanosine
  modified_base 9: mod_base = OTHER; note = 2'-O-methyl guanosine
  modified_base 10: mod_base = OTHER; note = 2'-fluoro adenosine
  modified_base 11: mod_base = OTHER; note = 2'-O-methyl uridine
  modified_base 12: mod_base = OTHER; note = 2'-O-methyl guanosine
  modified_base 13: mod_base = OTHER; note = 2'-O-methyl uridine
  modified_base 14: mod_base = OTHER; note = 2'-fluoro guanosine phosphorothioate
  modified_base 15: mod_base = OTHER; note = 2'-O-methyl uridine phosphorothioate
  modified_base 16: mod_base = OTHER; note = 2'-O-methyl adenosine triethylene glycol
ccgatctggatgtgta

SEQ ID NO: 1001 - RNA, 16 nt, synthetic construct
  source 1..16: mol_type = other RNA
  modified_base 1: mod_base = OTHER; note = 2'-O-methyl cytosine phosphorothioate
  modified_base 2: mod_base = OTHER; note = 2'-O-methyl guanosine phosphorothioate
  modified_base 3: mod_base = OTHER; note = 2'-O-methyl adenosine
  modified_base 4: mod_base = OTHER; note = 2'-fluoro uridine
  modified_base 5: mod_base = OTHER; note = 2'-O-methyl cytosine
  modified_base 6: mod_base = OTHER; note = 2'-fluoro uridine
  modified_base 7: mod_base = OTHER; note = 2'-O-methyl guanosine
  modified_base 8: mod_base = OTHER; note = 2'-fluoro guanosine
  modified_base 9: mod_base = OTHER; note = 2'-O-methyl adenosine
  modified_base 10: mod_base = OTHER; note = 2'-fluoro uridine
  modified_base 11: mod_base = OTHER; note = 2'-O-methyl guanosine
  modified_base 12: mod_base = OTHER; note = 2'-O-methyl uridine
  modified_base 13: mod_base = OTHER; note = 2'-O-methyl guanosine
  modified_base 14: mod_base = OTHER; note = 2'-fluoro uridine phosphorothioate
  modified_base 15: mod_base = OTHER; note = 2'-O-methyl cytosine phosphorothioate
  modified_base 16: mod_base = OTHER; note = 2'-O-methyl adenosine triethylene glycol
cgatctggatgtgtca

SEQ ID NO: 1002 - RNA, 16 nt, synthetic construct
  source 1..16: mol_type = other RNA
  modified_base 1: mod_base = OTHER; note = 2'-O-methyl adenosine phosphorothioate
  modified_base 2: mod_base = OTHER; note = 2'-O-methyl uridine phosphorothioate
  modified_base 3: mod_base = OTHER; note = 2'-O-methyl cytosine
  modified_base 4: mod_base = OTHER; note = 2'-fluoro uridine
  modified_base 5: mod_base = OTHER; note = 2'-O-methyl guanosine
  modified_base 6: mod_base = OTHER; note = 2'-fluoro guanosine
  modified_base 7: mod_base = OTHER; note = 2'-O-methyl adenosine
  modified_base 8: mod_base = OTHER; note = 2'-fluoro uridine
  modified_base 9: mod_base = OTHER; note = 2'-O-methyl guanosine
  modified_base 10: mod_base = OTHER; note = 2'-fluoro uridine
  modified_base 11: mod_base = OTHER; note = 2'-O-methyl guanosine
  modified_base 12: mod_base = OTHER; note = 2'-O-methyl uridine
  modified_base 13: mod_base = OTHER; note = 2'-O-methyl cytosine
  modified_base 14: mod_base = OTHER; note = 2'-fluoro cytosine phosphorothioate
  modified_base 15: mod_base = OTHER; note = 2'-O-methyl cytosine phosphorothioate
  modified_base 16: mod_base = OTHER; note = 2'-O-methyl adenosine triethylene glycol
atctggatgtgtccca

SEQ ID NO: 1003 - RNA, 16 nt, synthetic construct
  source 1..16: mol_type = other RNA
  modified_base 1: mod_base = OTHER; note = 2'-O-methyl uridine phosphorothioate
  modified_base 2: mod_base = OTHER; note = 2'-O-methyl cytosine phosphorothioate
  modified_base 3: mod_base = OTHER; note = 2'-O-methyl uridine
  modified_base 4: mod_base = OTHER; note = 2'-fluoro guanosine
  modified_base 5: mod_base = OTHER; note = 2'-O-methyl guanosine
  modified_base 6: mod_base = OTHER; note = 2'-fluoro adenosine
  modified_base 7: mod_base = OTHER; note = 2'-O-methyl uridine
  modified_base 8: mod_base = OTHER; note = 2'-fluoro guanosine
  modified_base 9: mod_base = OTHER; note = 2'-O-methyl uridine
  modified_base 10: mod_base = OTHER; note = 2'-fluoro guanosine
  modified_base 11: mod_base = OTHER; note = 2'-O-methyl uridine
  modified_base 12: mod_base = OTHER; note = 2'-O-methyl cytosine
  modified_base 13: mod_base = OTHER; note = 2'-O-methyl cytosine
  modified_base 14: mod_base = OTHER; note = 2'-fluoro cytosine phosphorothioate
  modified_base 15: mod_base = OTHER; note = 2'-O-methyl adenosine phosphorothioate
  modified_base 16: mod_base = OTHER; note = 2'-O-methyl adenosine triethylene glycol
tctggatgtgtcccaa

SEQ ID NO: 1004 - RNA, 16 nt, synthetic construct
  source 1..16: mol_type = other RNA
  modified_base 1: mod_base = OTHER; note = 2'-O-methyl uridine phosphorothioate
  modified_base 2: mod_base = OTHER; note = 2'-O-methyl guanosine phosphorothioate
  modified_base 3: mod_base = OTHER; note = 2'-O-methyl guanosine
  modified_base 4: mod_base = OTHER; note = 2'-fluoro adenosine
  modified_base 5: mod_base = OTHER; note = 2'-O-methyl uridine
  modified_base 6: mod_base = OTHER; note = 2'-fluoro guanosine
  modified_base 7: mod_base = OTHER; note = 2'-O-methyl uridine
  modified_base 8: mod_base = OTHER; note = 2'-fluoro guanosine
  modified_base 9: mod_base = OTHER; note = 2'-O-methyl uridine
  modified_base 10: mod_base = OTHER; note = 2'-fluoro cytosine
  modified_base 11: mod_base = OTHER; note = 2'-O-methyl cytosine
  modified_base 12: mod_base = OTHER; note = 2'-O-methyl cytosine
  modified_base 13: mod_base = OTHER; note = 2'-O-methyl adenosine
  modified_base 14: mod_base = OTHER; note = 2'-fluoro guanosine phosphorothioate
  modified_base 15: mod_base = OTHER; note = 2'-O-methyl adenosine phosphorothioate
  modified_base 16: mod_base = OTHER; note = 2'-O-methyl adenosine triethylene glycol
tggatgtgtcccagaa

SEQ ID NO: 1005 - RNA, 16 nt, synthetic construct
  source 1..16: mol_type = other RNA
  modified_base 1: mod_base = OTHER; note = 2'-O-methyl adenosine phosphorothioate
  modified_base 2: mod_base = OTHER; note = 2'-O-methyl uridine phosphorothioate
  modified_base 3: mod_base = OTHER; note = 2'-O-methyl guanosine
  modified_base 4: mod_base = OTHER; note = 2'-fluoro uridine
  modified_base 5: mod_base = OTHER; note = 2'-O-methyl guanosine
  modified_base 6: mod_base = OTHER; note = 2'-fluoro uridine
  modified_base 7: mod_base = OTHER; note = 2'-O-methyl cytosine
  modified_base 8: mod_base = OTHER; note = 2'-fluoro cytosine
  modified_base 9: mod_base = OTHER; note = 2'-O-methyl cytosine
  modified_base 10: mod_base = OTHER; note = 2'-fluoro adenosine
  modified_base 11: mod_base = OTHER; note = 2'-O-methyl guanosine
  modified_base 12: mod_base = OTHER; note = 2'-O-methyl adenosine
  modified_base 13: mod_base = OTHER; note = 2'-O-methyl uridine
  modified_base 14: mod_base = OTHER; note = 2'-fluoro guanosine phosphorothioate
  modified_base 15: mod_base = OTHER; note = 2'-O-methyl guanosine phosphorothioate
  modified_base 16: mod_base = OTHER; note = 2'-O-methyl adenosine triethylene glycol
atgtgtcccagatgga

SEQ ID NO: 1006 - RNA, 16 nt, synthetic construct
  source 1..16: mol_type = other RNA
  modified_base 1: mod_base = OTHER; note = 2'-O-methyl uridine phosphorothioate
  modified_base 2: mod_base = OTHER; note = 2'-O-methyl guanosine phosphorothioate
  modified_base 3: mod_base = OTHER; note = 2'-O-methyl uridine
  modified_base 4: mod_base = OTHER; note = 2'-fluoro guanosine
  modified_base 5: mod_base = OTHER; note = 2'-O-methyl uridine
  modified_base 6: mod_base = OTHER; note = 2'-fluoro cytosine
  modified_base 7: mod_base = OTHER; note = 2'-O-methyl cytosine
  modified_base 8: mod_base = OTHER; note = 2'-fluoro cytosine
  modified_base 9: mod_base = OTHER; note = 2'-O-methyl adenosine
  modified_base 10: mod_base = OTHER; note = 2'-fluoro guanosine
  modified_base 11: mod_base = OTHER; note = 2'-O-methyl adenosine
  modified_base 12: mod_base = OTHER; note = 2'-O-methyl uridine
  modified_base 13: mod_base = OTHER; note = 2'-O-methyl guanosine
  modified_base 14: mod_base = OTHER; note = 2'-fluoro guanosine phosphorothioate
  modified_base 15: mod_base = OTHER; note = 2'-O-methyl cytosine phosphorothioate
  modified_base 16: mod_base = OTHER; note = 2'-O-methyl adenosine triethylene glycol
tgtgtcccagatggca

SEQ ID NO: 1007 - RNA, 16 nt, synthetic construct
  source 1..16: mol_type = other RNA
  modified_base 1: mod_base = OTHER; note = 2'-O-methyl guanosine phosphorothioate
  modified_base 2: mod_base = OTHER; note = 2'-O-methyl uridine phosphorothioate
  modified_base 3: mod_base = OTHER; note = 2'-O-methyl guanosine
  modified_base 4: mod_base = OTHER; note = 2'-fluoro uridine
  modified_base 5: mod_base = OTHER; note = 2'-O-methyl cytosine
  modified_base 6: mod_base = OTHER; note = 2'-fluoro cytosine
  modified_base 7: mod_base = OTHER; note = 2'-O-methyl cytosine
  modified_base 8: mod_base = OTHER; note = 2'-fluoro adenosine
  modified_base 9: mod_base = OTHER; note = 2'-O-methyl guanosine
  modified_base 10: mod_base = OTHER; note = 2'-fluoro adenosine
  modified_base 11: mod_base = OTHER; note = 2'-O-methyl uridine
  modified_base 12: mod_base = OTHER; note = 2'-O-methyl guanosine
  modified_base 13: mod_base = OTHER; note = 2'-O-methyl guanosine
  modified_base 14: mod_base = OTHER; note = 2'-fluoro cytosine phosphorothioate
  modified_base 15: mod_base = OTHER; note = 2'-O-methyl adenosine phosphorothioate
  modified_base 16: mod_base = OTHER; note = 2'-O-methyl adenosine triethylene glycol
gtgtcccagatggcaa

SEQ ID NO: 1008 - RNA, 16 nt, synthetic construct
  source 1..16: mol_type = other RNA
  modified_base 1: mod_base = OTHER; note = 2'-O-methyl uridine phosphorothioate
  modified_base 2: mod_base = OTHER; note = 2'-O-methyl guanosine phosphorothioate
  modified_base 3: mod_base = OTHER; note = 2'-O-methyl uridine
  modified_base 4: mod_base = OTHER; note = 2'-fluoro cytosine
  modified_base 5: mod_base = OTHER; note = 2'-O-methyl cytosine
  modified_base 6: mod_base = OTHER; note = 2'-fluoro cytosine
  modified_base 7: mod_base = OTHER; note = 2'-O-methyl adenosine
  modified_base 8: mod_base = OTHER; note = 2'-fluoro guanosine
  modified_base 9: mod_base = OTHER; note = 2'-O-methyl adenosine
  modified_base 10: mod_base = OTHER; note = 2'-fluoro uridine
  modified_base 11: mod_base = OTHER; note = 2'-O-methyl guanosine
  modified_base 12: mod_base = OTHER; note = 2'-O-methyl guanosine
  modified_base 13: mod_base = OTHER; note = 2'-O-methyl cytosine
  modified_base 14: mod_base = OTHER; note = 2'-fluoro adenosine phosphorothioate
  modified_base 15: mod_base = OTHER; note = 2'-O-methyl uridine phosphorothioate
  modified_base 16: mod_base = OTHER; note = 2'-O-methyl adenosine triethylene glycol
tgtcccagatggcata

SEQ ID NO: 1009 - RNA, 16 nt, synthetic construct
  source 1..16: mol_type = other RNA
  modified_base 1: mod_base = OTHER; note = 2'-O-methyl guanosine phosphorothioate
  modified_base 2: mod_base = OTHER; note = 2'-O-methyl uridine phosphorothioate
  modified_base 3: mod_base = OTHER; note = 2'-O-methyl cytosine
  modified_base 4: mod_base = OTHER; note = 2'-fluoro cytosine
  modified_base 5: mod_base = OTHER; note = 2'-O-methyl cytosine
  modified_base 6: mod_base = OTHER; note = 2'-fluoro adenosine
  modified_base 7: mod_base = OTHER; note = 2'-O-methyl guanosine
  modified_base 8: mod_base = OTHER; note = 2'-fluoro adenosine
  modified_base 9: mod_base = OTHER; note = 2'-O-methyl uridine
  modified_base 10: mod_base = OTHER; note = 2'-fluoro guanosine
  modified_base 11: mod_base = OTHER; note = 2'-O-methyl guanosine
  modified_base 12: mod_base = OTHER; note = 2'-O-methyl cytosine
  modified_base 13: mod_base = OTHER; note = 2'-O-methyl adenosine
  modified_base 14: mod_base = OTHER; note = 2'-fluoro uridine phosphorothioate
  modified_base 15: mod_base = OTHER; note = 2'-O-methyl uridine phosphorothioate
  modified_base 16: mod_base = OTHER; note = 2'-O-methyl adenosine triethylene glycol
gtcccagatggcatta

SEQ ID NO: 1010 - RNA, 16 nt, synthetic construct
  source 1..16: mol_type = other RNA
  modified_base 1: mod_base = OTHER; note = 2'-O-methyl cytosine phosphorothioate
  modified_base 2: mod_base = OTHER; note = 2'-O-methyl cytosine phosphorothioate
  modified_base 3: mod_base = OTHER; note = 2'-O-methyl cytosine
  modified_base 4: mod_base = OTHER; note = 2'-fluoro adenosine
  modified_base 5: mod_base = OTHER; note = 2'-O-methyl guanosine
  modified_base 6: mod_base = OTHER; note = 2'-fluoro adenosine
  modified_base 7: mod_base = OTHER; note = 2'-O-methyl uridine
  modified_base 8: mod_base = OTHER; note = 2'-fluoro guanosine
  modified_base 9: mod_base = OTHER; note = 2'-O-methyl guanosine
  modified_base 10: mod_base = OTHER; note = 2'-fluoro cytosine
  modified_base 11: mod_base = OTHER; note = 2'-O-methyl adenosine
  modified_base 12: mod_base = OTHER; note = 2'-O-methyl uridine
  modified_base 13: mod_base = OTHER; note = 2'-O-methyl uridine
  modified_base 14: mod_base = OTHER; note = 2'-fluoro uridine phosphorothioate
  modified_base 15: mod_base = OTHER; note = 2'-O-methyl guanosine phosphorothioate
  modified_base 16: mod_base = OTHER; note = 2'-O-methyl adenosine triethylene glycol
cccagatggcatttga

SEQ ID NO: 1011 - RNA, 16 nt, synthetic construct
  source 1..16: mol_type = other RNA
  modified_base 1: mod_base = OTHER; note = 2'-O-methyl cytosine phosphorothioate
  modified_base 2: mod_base = OTHER; note = 2'-O-methyl adenosine phosphorothioate
  modified_base 3: mod_base = OTHER; note = 2'-O-methyl guanosine
  modified_base 4: mod_base = OTHER; note = 2'-fluoro adenosine
  modified_base 5: mod_base = OTHER; note = 2'-O-methyl uridine
  modified_base 6: mod_base = OTHER; note = 2'-fluoro guanosine
  modified_base 7: mod_base = OTHER; note = 2'-O-methyl guanosine
  modified_base 8: mod_base = OTHER; note = 2'-fluoro cytosine
  modified_base 9: mod_base = OTHER; note = 2'-O-methyl adenosine
  modified_base 10: mod_base = OTHER; note = 2'-fluoro uridine
  modified_base 11: mod_base = OTHER; note = 2'-O-methyl uridine
  modified_base 12: mod_base = OTHER; note = 2'-O-methyl uridine
  modified_base 13: mod_base = OTHER; note = 2'-O-methyl guanosine
  modified_base 14: mod_base = OTHER; note = 2'-fluoro guanosine phosphorothioate
  modified_base 15: mod_base = OTHER; note = 2'-O-methyl uridine phosphorothioate
  modified_base 16: mod_base = OTHER; note = 2'-O-methyl adenosine triethylene glycol
cagatggcatttggta

SEQ ID NO: 1012 - RNA, 16 nt, synthetic construct
  source 1..16: mol_type = other RNA
  modified_base 1: mod_base = OTHER; note = 2'-O-methyl adenosine phosphorothioate
  modified_base 2: mod_base = OTHER; note = 2'-O-methyl guanosine phosphorothioate
  modified_base 3: mod_base = OTHER; note = 2'-O-methyl adenosine
  modified_base 4: mod_base = OTHER; note = 2'-fluoro uridine
  modified_base 5: mod_base = OTHER; note = 2'-O-methyl guanosine
  modified_base 6: mod_base = OTHER; note = 2'-fluoro guanosine
  modified_base 7: mod_base = OTHER; note = 2'-O-methyl cytosine
  modified_base 8: mod_base = OTHER; note = 2'-fluoro adenosine
  modified_base 9: mod_base = OTHER; note = 2'-O-methyl uridine
  modified_base 10: mod_base = OTHER; note = 2'-fluoro uridine
  modified_base 11: mod_base = OTHER; note = 2'-O-methyl uridine
  modified_base 12: mod_base = OTHER; note = 2'-O-methyl guanosine
  modified_base 13: mod_base = OTHER; note = 2'-O-methyl guanosine
  modified_base 14: mod_base = OTHER; note = 2'-fluoro uridine phosphorothioate
  modified_base 15: mod_base = OTHER; note = 2'-O-methyl adenosine phosphorothioate
  modified_base 16: mod_base = OTHER; note = 2'-O-methyl adenosine triethylene glycol
agatggcatttggtaa

SEQ ID NO: 1013 - RNA, 16 nt, synthetic construct
  source 1..16: mol_type = other RNA
  modified_base 1: mod_base = OTHER; note = 2'-O-methyl guanosine phosphorothioate
  modified_base 2: mod_base = OTHER; note = 2'-O-methyl adenosine phosphorothioate
  modified_base 3: mod_base = OTHER; note = 2'-O-methyl uridine
  modified_base 4: mod_base = OTHER; note = 2'-fluoro guanosine
  modified_base 5: mod_base = OTHER; note = 2'-O-methyl guanosine
  modified_base 6: mod_base = OTHER; note = 2'-fluoro cytosine
  modified_base 7: mod_base = OTHER; note = 2'-O-methyl adenosine
  modified_base 8: mod_base = OTHER; note = 2'-fluoro uridine
  modified_base 9: mod_base = OTHER; note = 2'-O-methyl uridine
  modified_base 10: mod_base = OTHER; note = 2'-fluoro uridine
  modified_base 11: mod_base = OTHER; note = 2'-O-methyl guanosine
  modified_base 12: mod_base = OTHER; note = 2'-O-methyl guanosine
  modified_base 13: mod_base = OTHER; note = 2'-O-methyl uridine
  modified_base 14: mod_base = OTHER; note = 2'-fluoro adenosine phosphorothioate
  modified_base 15: mod_base = OTHER; note = 2'-O-methyl adenosine phosphorothioate
  modified_base 16: mod_base = OTHER; note = 2'-O-methyl adenosine triethylene glycol
gatggcatttggtaaa

SEQ ID NO: 1014 - RNA, 16 nt, synthetic construct
  source 1..16: mol_type = other RNA
  modified_base 1: mod_base = OTHER; note = 2'-O-methyl adenosine phosphorothioate
  modified_base 2: mod_base = OTHER; note = 2'-O-methyl uridine phosphorothioate
  modified_base 3: mod_base = OTHER; note = 2'-O-methyl guanosine
  modified_base 4: mod_base = OTHER; note = 2'-fluoro guanosine
  modified_base 5: mod_base = OTHER; note = 2'-O-methyl cytosine
  modified_base 6: mod_base = OTHER; note = 2'-fluoro adenosine
  modified_base 7: mod_base = OTHER; note = 2'-O-methyl uridine
  modified_base 8: mod_base = OTHER; note = 2'-fluoro uridine
  modified_base 9: mod_base = OTHER; note = 2'-O-methyl uridine
  modified_base 10: mod_base = OTHER; note = 2'-fluoro guanosine
  modified_base 11: mod_base = OTHER; note = 2'-O-methyl guanosine
  modified_base 12: mod_base = OTHER; note = 2'-O-methyl uridine
  modified_base 13: mod_base = OTHER; note = 2'-O-methyl adenosine
  modified_base 14: mod_base = OTHER; note = 2'-fluoro adenosine phosphorothioate
  modified_base 15: mod_base = OTHER; note = 2'-O-methyl guanosine phosphorothioate
  modified_base 16: mod_base = OTHER; note = 2'-O-methyl adenosine triethylene glycol
atggcatttggtaaga

SEQ ID NO: 1015 - RNA, 16 nt, synthetic construct
  source 1..16: mol_type = other RNA
  modified_base 1: mod_base = OTHER; note = 2'-O-methyl uridine phosphorothioate
  modified_base 2: mod_base = OTHER; note = 2'-O-methyl guanosine phosphorothioate
  modified_base 3: mod_base = OTHER; note = 2'-O-methyl guanosine
  modified_base 4: mod_base = OTHER; note = 2'-fluoro cytosine
  modified_base 5: mod_base = OTHER; note = 2'-O-methyl adenosine
  modified_base 6: mod_base = OTHER; note = 2'-fluoro uridine
  modified_base 7: mod_base = OTHER; note = 2'-O-methyl uridine
  modified_base 8: mod_base = OTHER; note = 2'-fluoro uridine
  modified_base 9: mod_base = OTHER; note = 2'-O-methyl guanosine
  modified_base 10: mod_base = OTHER; note = 2'-fluoro guanosine
  modified_base 11: mod_base = OTHER; note = 2'-O-methyl uridine
  modified_base 12: mod_base = OTHER; note = 2'-O-methyl adenosine
  modified_base 13: mod_base = OTHER; note = 2'-O-methyl adenosine
  modified_base 14: mod_base = OTHER; note = 2'-fluoro guanosine phosphorothioate
  modified_base 15: mod_base = OTHER; note = 2'-O-methyl adenosine phosphorothioate
  modified_base 16: mod_base = OTHER; note = 2'-O-methyl adenosine triethylene glycol
tggcatttggtaagaa

SEQ ID NO: 1016 - RNA, 16 nt, synthetic construct
  source 1..16: mol_type = other RNA
  modified_base 1: mod_base = OTHER; note = 2'-O-methyl guanosine phosphorothioate
  modified_base 2: mod_base = OTHER; note = 2'-O-methyl guanosine phosphorothioate
  modified_base 3: mod_base = OTHER; note = 2'-O-methyl cytosine
  modified_base 4: mod_base = OTHER; note = 2'-fluoro adenosine
  modified_base 5: mod_base = OTHER; note = 2'-O-methyl uridine
  modified_base 6: mod_base = OTHER; note = 2'-fluoro uridine
  modified_base 7: mod_base = OTHER; note = 2'-O-methyl uridine
  modified_base 8: mod_base = OTHER; note = 2'-fluoro guanosine
  modified_base 9: mod_base = OTHER; note = 2'-O-methyl guanosine
  modified_base 10: mod_base = OTHER; note = 2'-fluoro uridine
  modified_base 11: mod_base = OTHER; note = 2'-O-methyl adenosine
  modified_base 12: mod_base = OTHER; note = 2'-O-methyl adenosine
  modified_base 13: mod_base = OTHER; note = 2'-O-methyl guanosine
  modified_base 14: mod_base = OTHER; note = 2'-fluoro adenosine phosphorothioate
  modified_base 15: mod_base = OTHER; note = 2'-O-methyl adenosine phosphorothioate
  modified_base 16: mod_base = OTHER; note = 2'-O-methyl adenosine triethylene glycol
ggcatttggtaagaaa

SEQ ID NO: 1017 - RNA, 16 nt, synthetic construct
  source 1..16: mol_type = other RNA
  modified_base 1: mod_base = OTHER; note = 2'-O-methyl guanosine phosphorothioate
  modified_base 2: mod_base = OTHER; note = 2'-O-methyl cytosine phosphorothioate
  modified_base 3: mod_base = OTHER; note = 2'-O-methyl adenosine
  modified_base 4: mod_base = OTHER; note = 2'-fluoro uridine
  modified_base 5: mod_base = OTHER; note = 2'-O-methyl uridine
  modified_base 6: mod_base = OTHER; note = 2'-fluoro uridine
  modified_base 7: mod_base = OTHER; note = 2'-O-methyl guanosine
  modified_base 8: mod_base = OTHER; note = 2'-fluoro guanosine
  modified_base 9: mod_base = OTHER; note = 2'-O-methyl uridine
  modified_base 10: mod_base = OTHER; note = 2'-fluoro adenosine
  modified_base 11: mod_base = OTHER; note = 2'-O-methyl adenosine
  modified_base 12: mod_base = OTHER; note = 2'-O-methyl guanosine
  modified_base 13: mod_base = OTHER; note = 2'-O-methyl adenosine
  modified_base 14: mod_base = OTHER; note = 2'-fluoro adenosine phosphorothioate
  modified_base 15: mod_base = OTHER; note = 2'-O-methyl uridine phosphorothioate
  modified_base 16: mod_base = OTHER; note = 2'-O-methyl adenosine triethylene glycol
gcatttggtaagaata

SEQ ID NO: 1018 - RNA, 16 nt, synthetic construct
  source 1..16: mol_type = other RNA
  modified_base 1: mod_base = OTHER; note = 2'-O-methyl cytosine phosphorothioate
  modified_base 2: mod_base = OTHER; note = 2'-O-methyl adenosine phosphorothioate
  modified_base 3: mod_base = OTHER; note = 2'-O-methyl uridine
  modified_base 4: mod_base = OTHER; note = 2'-fluoro uridine
  modified_base 5: mod_base = OTHER; note = 2'-O-methyl uridine
  modified_base 6: mod_base = OTHER; note = 2'-fluoro guanosine
  modified_base 7: mod_base = OTHER; note = 2'-O-methyl guanosine
  modified_base 8: mod_base = OTHER; note = 2'-fluoro uridine
  modified_base 9: mod_base = OTHER; note = 2'-O-methyl adenosine
  modified_base 10: mod_base = OTHER; note = 2'-fluoro adenosine
  modified_base 11: mod_base = OTHER; note = 2'-O-methyl guanosine
  modified_base 12: mod_base = OTHER; note = 2'-O-methyl adenosine
  modified_base 13: mod_base = OTHER; note = 2'-O-methyl adenosine
  modified_base 14: mod_base = OTHER; note = 2'-fluoro uridine phosphorothioate
  modified_base 15: mod_base = OTHER; note = 2'-O-methyl adenosine phosphorothioate
  modified_base 16: mod_base = OTHER; note = 2'-O-methyl adenosine triethylene glycol
catttggtaagaataa

SEQ ID NO: 1019 - RNA, 16 nt, synthetic construct
  source 1..16: mol_type = other RNA
  modified_base 1: mod_base = OTHER; note = 2'-O-methyl adenosine phosphorothioate
  modified_base 2: mod_base = OTHER; note = 2'-O-methyl uridine phosphorothioate
  modified_base 3: mod_base = OTHER; note = 2'-O-methyl uridine
  modified_base 4: mod_base = OTHER; note = 2'-fluoro uridine
  modified_base 5: mod_base = OTHER; note = 2'-O-methyl guanosine
  modified_base 6: mod_base = OTHER; note = 2'-fluoro guanosine
  modified_base 7: mod_base = OTHER; note = 2'-O-methyl uridine
  modified_base 8: mod_base = OTHER; note = 2'-fluoro adenosine
  modified_base 9: mod_base = OTHER; note = 2'-O-methyl adenosine
  modified_base 10: mod_base = OTHER; note = 2'-fluoro guanosine
  modified_base 11: mod_base = OTHER; note = 2'-O-methyl adenosine
  modified_base 12: mod_base = OTHER; note = 2'-O-methyl adenosine
  modified_base 13: mod_base = OTHER; note = 2'-O-methyl uridine
  modified_base 14: mod_base = OTHER; note = 2'-fluoro adenosine phosphorothioate
  modified_base 15: mod_base = OTHER; note = 2'-O-methyl uridine phosphorothioate
  modified_base 16: mod_base = OTHER; note = 2'-O-methyl adenosine triethylene glycol
atttggtaagaatata

SEQ ID NO: 1020 - RNA, 16 nt, synthetic construct
  source 1..16: mol_type = other RNA
  modified_base 1: mod_base = OTHER; note = 2'-O-methyl uridine phosphorothioate
  modified_base 2: mod_base = OTHER; note = 2'-O-methyl uridine phosphorothioate
  modified_base 3: mod_base = OTHER; note = 2'-O-methyl uridine
  modified_base 4: mod_base = OTHER; note = 2'-fluoro guanosine
  modified_base 5: mod_base = OTHER; note = 2'-O-methyl guanosine
  modified_base 6: mod_base = OTHER; note = 2'-fluoro uridine
  modified_base 7: mod_base = OTHER; note = 2'-O-methyl adenosine
  modified_base 8: mod_base = OTHER; note = 2'-fluoro adenosine
  modified_base 9: mod_base = OTHER; note = 2'-O-methyl guanosine
  modified_base 10: mod_base = OTHER; note = 2'-fluoro adenosine
  modified_base 11: mod_base = OTHER; note = 2'-O-methyl adenosine
  modified_base 12: mod_base = OTHER; note = 2'-O-methyl uridine
  modified_base 13: mod_base = OTHER; note = 2'-O-methyl adenosine
  modified_base 14: mod_base = OTHER; note = 2'-fluoro uridine phosphorothioate
  modified_base 15: mod_base = OTHER; note = 2'-O-methyl cytosine phosphorothioate
  modified_base 16: mod_base = OTHER; note = 2'-O-methyl adenosine triethylene glycol
tttggtaagaatatca

SEQ ID NO: 1021 - RNA, 16 nt, synthetic construct
  source 1..16: mol_type = other RNA
  modified_base 1: mod_base = OTHER; note = 2'-O-methyl uridine phosphorothioate
  modified_base 2: mod_base = OTHER; note = 2'-O-methyl uridine phosphorothioate
  modified_base 3: mod_base = OTHER; note = 2'-O-methyl guanosine
  modified_base 4: mod_base = OTHER; note = 2'-fluoro guanosine
  modified_base 5: mod_base = OTHER; note = 2'-O-methyl uridine
  modified_base 6: mod_base = OTHER; note = 2'-fluoro adenosine
  modified_base 7: mod_base = OTHER; note = 2'-O-methyl adenosine
  modified_base 8: mod_base = OTHER; note = 2'-fluoro guanosine
  modified_base 9: mod_base = OTHER; note = 2'-O-methyl adenosine
  modified_base 10: mod_base = OTHER; note = 2'-fluoro adenosine
  modified_base 11: mod_base = OTHER; note = 2'-O-methyl uridine
  modified_base 12: mod_base = OTHER; note = 2'-O-methyl adenosine
  modified_base 13: mod_base = OTHER; note = 2'-O-methyl uridine
  modified_base 14: mod_base = OTHER; note = 2'-fluoro cytosine phosphorothioate
  modified_base 15: mod_base = OTHER; note = 2'-O-methyl uridine phosphorothioate
  modified_base 16: mod_base = OTHER; note = 2'-O-methyl adenosine triethylene glycol
ttggtaagaatatcta

SEQ ID NO: 1022 - RNA, 20 nt, synthetic construct
  source 1..20: mol_type = other RNA
ttaactacactacaccacaa

SEQ ID NO: 1023 - RNA, 15 nt, synthetic construct
  source 1..15: mol_type = other RNA
gtgtagtgtagttaa

SEQ ID NO: 1024 - RNA, 20 nt, synthetic construct
  source 1..20: mol_type = other RNA
ttaaaagcattatgtcatcc

SEQ ID NO: 1025 - RNA, 15 nt, synthetic construct
  source 1..15: mol_type = other RNA
acataatgcttttaa

1. A double stranded RNA (dsRNA) molecule comprising a sense strand and an antisense strand, wherein the antisense strand comprises a sequence substantially complementary to a huntingtin (HTT) nucleic acid sequence of any one of SEQ ID NOs: 1-13.

2. The dsRNA molecule of claim 1, wherein the antisense strand comprises a sequence substantially complementary to a nucleic acid of any one of SEQ ID NOs: 14-26.

3-25. (canceled)

26. The dsRNA molecule of claim 1, wherein the dsRNA molecule comprises at least one modified nucleotide.

27. The dsRNA molecule of claim 26, wherein the at least one modified nucleotide comprises a 2′-O-methyl modified nucleotide, a 2′-deoxy-2′-fluoro modified nucleotide, a 2′-deoxy-modified nucleotide, a locked nucleotide, an abasic nucleotide, a 2′-amino-modified nucleotide, a 2′-alkyl-modified nucleotide, a morpholino nucleotide, a phosphoramidate, a non-natural base comprising nucleotide, or a mixture thereof.

28-31. (canceled)

32. The dsRNA molecule of claim 1, wherein the dsRNA molecule comprises at least one modified internucleotide linkage of Formula I: [chemical structure]
wherein:
B is a base pairing moiety;
W is selected from the group consisting of O, OCH₂, OCH, CH₂, and CH;
X is selected from the group consisting of halo, hydroxy, and C₁₋₆ alkoxy;
Y is selected from the group consisting of O⁻, OH, OR, NH⁻, NH₂, S⁻, and SH;
Z is selected from the group consisting of O and CH₂;
R is a protecting group; and [symbol]
is an optional double bond.

33-44. (canceled)

45. The dsRNA molecule of claim 1, wherein the antisense strand and the sense strand each comprises separately a 5′ end and a 3′ end, wherein:
A:
(1) the antisense strand comprises a sequence substantially complementary to a huntingtin variant 1A (HTT-1A) nucleic acid sequence of any one of SEQ ID NOs: 1-13;
(2) the antisense strand comprises alternating 2′-methoxy-ribonucleotides and 2′-fluoro-ribonucleotides;
(3) the nucleotides at positions 2 and 14 from the 5′ end of the antisense strand are not 2′-methoxy-ribonucleotides;
(4) the nucleotides at positions 1-2 to 1-7 from the 3′ end of the antisense strand are connected to each other via phosphorothioate internucleotide linkages;
(5) a portion of the antisense strand is complementary to a portion of the sense strand;
(6) the sense strand comprises alternating 2′-methoxy-ribonucleotides and 2′-fluoro-ribonucleotides; and
(7) the nucleotides at positions 1-2 from the 5′ end of the sense strand are connected to each other via phosphorothioate internucleotide linkages;
B:
(1) the antisense strand comprises a sequence substantially complementary to a HTT-1A nucleic acid sequence of any one of SEQ ID NOs: 1-13;
(2) the antisense strand comprises at least 70% 2′-O-methyl modifications;
(3) the nucleotide at position 14 from the 5′ end of the antisense strand is not a 2′-methoxy-ribonucleotide;
(4) the nucleotides at positions 1-2 to 1-7 from the 3′ end of the antisense strand are connected to each other via phosphorothioate internucleotide linkages;
(5) a portion of the antisense strand is complementary to a portion of the sense strand;
(6) the sense strand comprises at least 70% 2′-O-methyl modifications; and
(7) the nucleotides at positions 1-2 from the 5′ end of the sense strand are connected to each other via phosphorothioate internucleotide linkages;
C:
(1) the antisense strand comprises a sequence substantially complementary to a HTT-1A nucleic acid sequence of any one of SEQ ID NOs: 1-13;
(2) the antisense strand comprises at least 85% 2′-O-methyl modifications;
(3) the nucleotides at positions 2 and 14 from the 5′ end of the antisense strand are not 2′-methoxy-ribonucleotides;
(4) the nucleotides at positions 1-2 to 1-7 from the 3′ end of the antisense strand are connected to each other via phosphorothioate internucleotide linkages;
(5) a portion of the antisense strand is complementary to a portion of the sense strand;
(6) the sense strand comprises 100% 2′-O-methyl modifications; and
(7) the nucleotides at positions 1-2 from the 5′ end of the sense strand are connected to each other via phosphorothioate internucleotide linkages;
D:
(1) the antisense strand comprises a sequence substantially complementary to a HTT-1A nucleic acid sequence of any one of SEQ ID NOs: 1-13;
(2) the antisense strand comprises at least 75% 2′-O-methyl modifications;
(3) the nucleotides at positions 4, 5, 6, and 14 from the 5′ end of the antisense strand are not 2′-methoxy-ribonucleotides;
(4) the nucleotides at positions 1-2 to 1-7 from the 3′ end of the antisense strand are connected to each other via phosphorothioate internucleotide linkages;
(5) a portion of the antisense strand is complementary to a portion of the sense strand;
(6) the sense strand comprises 100% 2′-O-methyl modifications; and
(7) the nucleotides at positions 1-2 from the 5′ end of the sense strand are connected to each other via phosphorothioate internucleotide linkages;
E:
(1) the antisense strand comprises a sequence substantially complementary to a HTT-1A nucleic acid sequence of any one of SEQ ID NOs: 1-13;
(2) the antisense strand comprises at least 75% 2′-O-methyl modifications;
(3) the nucleotides at positions 2, 4, 5, 6, and 14 from the 5′ end of the antisense strand are not 2′-methoxy-ribonucleotides;
(4) the nucleotides at positions 1-2 to 1-7 from the 3′ end of the antisense strand are connected to each other via phosphorothioate internucleotide linkages;
(5) a portion of the antisense strand is complementary to a portion of the sense strand;
(6) the sense strand comprises 100% 2′-O-methyl modifications; and
(7) the nucleotides at positions 1-2 from the 5′ end of the sense strand are connected to each other via phosphorothioate internucleotide linkages;
F:
(1) the antisense strand comprises a sequence substantially complementary to a HTT-1A nucleic acid sequence of any one of SEQ ID NOs: 1-13;
(2) the antisense strand comprises at least 75% 2′-O-methyl modifications;
(3) the nucleotides at positions 2, 6, 14, and 16 from the 5′ end of the antisense strand are not 2′-methoxy-ribonucleotides;
(4) the nucleotides at positions 1-2 to 1-7 from the 3′ end of the antisense strand are connected to each other via phosphorothioate internucleotide linkages;
(5) a portion of the antisense strand is complementary to a portion of the sense strand;
(6) the sense strand comprises at least 65% 2′-O-methyl modifications;
(7) the nucleotides at positions 7, 9, 10, and 11 from the 3′ end of the sense strand are not 2′-methoxy-ribonucleotides; and
(8) the nucleotides at positions 1-2 from the 5′ end of the sense strand are connected to each other via phosphorothioate internucleotide linkages; or
G:
(1) the antisense strand comprises a sequence substantially complementary to a HTT-1A nucleic acid sequence of any one of SEQ ID NOs: 1-13;
(2) the antisense strand comprises at least 75% 2′-O-methyl modifications;
(3) the nucleotides at positions 2 and 14 from the 5′ end of the antisense strand are not 2′-methoxy-ribonucleotides;
(4) the nucleotides at positions 1-2 to 1-7 from the 3′ end of the antisense strand are connected to each other via phosphorothioate internucleotide linkages;
(5) a portion of the antisense strand is complementary to a portion of the sense strand;
(6) the sense strand comprises at least 75% 2′-O-methyl modifications;
(7) the nucleotides at positions 7, 10, and 11 from the 3′ end of the sense strand are not 2′-methoxy-ribonucleotides; and
(8) the nucleotides at positions 1-2 from the 5′ end of the sense strand are connected to each other via phosphorothioate internucleotide linkages.

46-67. (canceled)

68. A pharmaceutical composition for inhibiting expression of a huntingtin variant 1A (HTT-1A) gene in an organism, the pharmaceutical composition comprising the dsRNA molecule of claim 1 and a pharmaceutically acceptable carrier.

69-70. (canceled)

71. A method for inhibiting expression of a huntingtin variant 1A (HTT-1A) gene in a cell, the method comprising:
(a) introducing into the cell the dsRNA molecule of claim 1; and
(b) maintaining the cell produced in step (a) for a time sufficient to obtain degradation of a mRNA transcript of the HTT-1A gene, thereby inhibiting expression of the HTT-1A gene in the cell.

72. A method of treating or managing a neurodegenerative disease comprising administering to a patient in need of such treatment a therapeutically effective amount of the dsRNA molecule of claim 1.

73-77. (canceled)

78. A vector comprising a regulatory sequence operably linked to a nucleotide sequence that encodes a double stranded RNA (dsRNA) molecule substantially complementary to a huntingtin variant 1A (HTT-1A) nucleic acid sequence of any one of SEQ ID NOs: 1-13.

79-82. (canceled)

83. An in vitro cell comprising the vector of claim 78.

84. A recombinant adeno-associated virus (rAAV) comprising the vector of claim 78 and an AAV capsid.

85. A branched RNA compound comprising two or more dsRNA molecules of claim 1 covalently bound to one another.

86. The branched RNA compound of claim 85, wherein the two or more dsRNA molecules are covalently bound to one another by way of a linker, a spacer, or a branching point.

87. A branched RNA compound comprising:
two or more RNA molecules each comprising independently 15 to 35 nucleotides in length, and
a sequence substantially complementary to a huntingtin variant 1A (HTT-1A) nucleic acid sequence of SEQ ID NOs: 1-13,
wherein the two or more RNA molecules are connected to one another by one or more moieties independently selected from a linker, a spacer, and a branching point.

88. The branched RNA compound of claim 87, wherein the branched RNA compound comprising a sequence substantially complementary to one or more of a HTT-1A nucleic acid sequence of any one of SEQ ID NOs: 14-26.

89-155. (canceled)

156. A compound of formula (I):
L-(N)ₙ (I)
wherein:
L comprises an ethylene glycol chain, an alkyl chain, a peptide, an RNA, a DNA, a phosphate, a phosphonate, a phosphoramidate, an ester, an amide, a triazole, or combinations thereof, and optionally wherein the formula (I) further comprises one or more branch point B, and one or more spacer S, wherein:
the one or more branched point B is independently for each occurrence a polyvalent organic species or derivative thereof; and
the one or more spacer S comprises independently for each occurrence an ethylene glycol chain, an alkyl chain, a peptide, an RNA, a DNA, a phosphate, a phosphonate, a phosphoramidate, an ester, an amide, a triazole, or a combination thereof;
N is a double stranded nucleic acid comprising 15 to 35 bases in length, a sense strand, and an antisense strand, wherein:
the antisense strand comprises a sequence substantially complementary to a huntingtin variant 1A (HTT-1A) nucleic acid sequence of any one of SEQ ID NOs: 1-13; and
the sense strand and the antisense strand each independently comprise one or more chemical modifications; and
n is 2, 3, 4, 5, 6, 7, or 8.

157-174. (canceled)

175. A pharmaceutical composition for inhibiting expression of a huntingtin variant 1A (HTT-1A) gene in an organism, the pharmaceutical composition comprising the branched RNA compound of claim 85 and a pharmaceutically acceptable carrier.

176-177. (canceled)

178. A method for inhibiting expression of a huntingtin variant 1A (HTT-1A) gene in a cell, the method comprising:
(a) introducing into the cell the branched RNA compound of claim 85; and
(b) maintaining the cell produced in step (a) for a time sufficient to obtain degradation of a mRNA transcript of the HTT-1A gene, thereby inhibiting expression of the HTT-1A gene in the cell.

179. A method of treating or managing a neurodegenerative disease,
the method comprising administering to a patient in need of such treatment or management a therapeutically effective amount of the branched RNA compound of claim 85.

180-184. (canceled)
